(19) United States
(12) Patent Application Publication
(10) Pub. No.: US 2007/0141570 A1
(43) Pub. Date: Jun. 21, 2007

(54) Association of polymorphic kinase anchor proteins with cardiac phenotypes and related methods

(75) Inventors: Andreas Braun, San Diego, CA (US); Stefan M. Kammerer, San Diego, CA (US)

Correspondence Address: GRANT ANDERSON LLP;C/O PORTFOLIOIP, PO BOX 52050, MINNEAPOLIS, MN, 55402, US

(73) Assignee: Sequenom, Inc., San Diego, CA (US)

(21) Appl. No.: 10/548,336

(22) PCT Filed: Mar. 5, 2004
(86) PCT No.: PCT/US04/06740

§ 371 Date: Sep. 9, 2006

Related U.S. Application Data
(60) Provisional application No. 60/453,350, filed on Mar. 7, 2003.

(51) Int. Cl. C12Q 1/68; G01N 33/53

(52) U.S. Cl. 435/6; 435/7.1

(57) ABSTRACT

Polymorphic A-kinase anchor proteins (AKAPs) and nucleic acids encoding the proteins are provided herein. Methods of detecting polymorphic AKAPs and nucleic acids encoding the AKAPs, and kits for use in the detection methods are also provided. Further provided herein are methods of identifying subjects having or at risk of developing diseases or disorders, such as those related to signal transduction and/or cardiovascular disease. Methods of determining susceptibility to morbidity and/or increased or early mortality are also provided.

### RELATED APPLICATIONS

[0001] This application claims the benefit of priority to U.S. provisional application Ser. No. 60/453,215, to Andreas Braun and Stefan Kammerer entitled “ASSOCIATION OF POLYMORPHIC KINASE ANCHOR PROTEINS WITH CARDIAC PHENOTYPES AND RELATED METHODS”, filed Mar. 7, 2003, U.S. provisional application Ser. No. 60/453,208, to Andreas Braun and Stefan Kammerer entitled “ASSOCIATION OF POLYMORPHIC KINASE ANCHOR PROTEINS WITH CARDIAC PHENOTYPES AND RELATED METHODS”, filed Mar. 7, 2003, and U.S. provisional application Ser. No. 60/453,350, to Andreas Braun and Stefan Kammerer entitled “ASSOCIATION OF POLYMORPHIC KINASE ANCHOR PROTEINS WITH CARDIAC PHENOTYPES AND RELATED METHODS”, filed Mar. 7, 2003.

[0002] Where permitted, the subject matter of each of the above-noted applications is incorporated herein by reference. Also, where permitted the subject matter and disclosure of U.S. application Ser. No. 09/834,700 to Andreas Braun entitled “POLYMORPHIC KINASE ANCHOR PROTEINS AND NUCLEIC ACIDS ENCODING THE SAME”, filed Apr. 12, 2001, and U.S. application Ser. No. 10/428,254 to Andreas Braun, Charles Cantor, Stefan Kammerer, Susan Taylor, and Lora Burns, entitled “KINASE ANCHOR PROTEIN MUTEINS, PEPTIDES THEREOF, AND RELATED METHODS”, filed May 1, 2003, are incorporated by reference.

### FIELD OF THE INVENTION

[0003] Methods of identifying subjects having or at a risk of developing disorders of cellular protein phosphorylation and/or signal transduction. Methods of determining susceptibility to morbidity and/or increased or early mortality are also provided.

### BACKGROUND OF THE INVENTION

[0004] Protein phosphorylation is an important mechanism for enzyme regulation and the transduction of extracellular signals across the cell membrane in eukaryotic cells. A wide variety of cellular substrates, including enzymes, membrane receptors, ion channels and transcription factors, can be phosphorylated in response to extracellular signals that interact with cells. A key enzyme in the phosphorylation of cellular proteins in response to hormones and neurotransmitters is cyclic AMP (cAMP)-dependent protein kinase (PKA). Upon activation by cAMP, PKA thus mediates a variety of cellular responses to such extracellular signals.

[0005] An array of PKA isozymes are expressed in mammalian cells. The PKAs usually exist as inactive tetrameres containing a regulatory (R) subunit dimer and two catalytic (C) subunits. Genes encoding three C subunits (Cα, Cβ and Cγ) and four R subunits (RIα, RIβ, RIIα and RIIβ) have been identified (see Takio et al. (1982) Proc. Natl. Acad. Sci. U.S.A. 79:2544-2548; Lee et al. (1983) Proc. Natl. Acad. Sci. U.S.A. 80:3608-3612; Jahnsen et al. (1996) J. Biol. Chem. 261:12352-12361; Clegg et al. (1988) Proc. Natl. Acad. Sci. U.S.A. 85:3703-3707; and Scott (1991) Pharmacol. Ther. 50:123-145). The type I (RI) α and type II (RII) α subunits are distributed ubiquitously, whereas RIβ and RIIβ are present mainly in brain (see. e.g., Miki and Eddy (1999) J. Biol. Chem. 274:29057-29062). The type I PKA holoenzyme (RIα and RIβ) is predominantly cytoplasmic, whereas the majority of type II PKA (RIIα and RIIβ) associates with cellular structures and organelles (Scott (1991) Pharmacol. Ther. 50:123-145). Many hormones and other signals act through receptors to generate cAMP which binds to the R subunits of PKA and releases and activates the C subunits to phosphorylate proteins.

[0006] Because protein kinases and their substrates are widely distributed throughout cells, there are mechanisms in place in cells to localize protein kinase-mediated responses to different signals. One such mechanism involves subcellular targeting of PKAs through association with anchoring proteins, referred to as A-kinase anchoring proteins (AKAPs), that place PKAs in close proximity to specific organelles or cytoskeletal components and particular substrates thereby providing for more specific PKA interactions and localized responses (see, e.g., Scott et al. (1990) J. Biol. Chem. 265:21561-21566; Bregman et al. (1991) J. Biol. Chem. 266:7207-7213; and Miki and Eddy (1999) J. Biol. Chem. 274:29057-29062). Anchoring not only places the kinase close to preferred substrates, but also positions the PKA holoenzyme at sites where it can optimally respond to fluctuations in the second messenger cAMP (Mochly-Rosen (1995) Science 268:247-251; Faux and Scott (1996) Trends Biochem. Sci. 21:312-315; Hubbard and Cohen (1993) Trends Biochem. Sci. 18:172-177).

[0007] Up to 75% of type II PKA is localized to various intracellular sites through association of the regulatory subunit (RII) with AKAPs (see, e.g., Hausken et al. (1996) J. Biol. Chem. 271:29016-29022). RII subunits of PKA bind to AKAPs with nanomolar affinity (Carr et al. (1992) J. Biol. Chem. 267:13376-13382), and many AKAP-RII complexes have been isolated from cell extracts. RI subunits of PKA bind to AKAPs with only micromolar affinity (Burton et al. (1997) Proc. Natl. Acad. Sci. U.S.A. 94:11067-11072). Evidence of binding of a PKA RI subunit to an AKAP has been reported (Miki and Eddy (1998) J. Biol. Chem 273:34384-34390) in which RIα-specific and RIα/RIIα dual specificity PKA anchoring domains were identified on FSC1/AKAP82. Additional dual specific AKAPs, referred to as D-AKAP1 and D-AKAP2, which interact with the type I and type II regulatory subunits of PKA have also been reported (Huang et al. (1997) J. Biol. Chem. 272:8057-8064; Huang et al. (1997) Proc. Natl. Acad. Sci. U.S.A. 94:11184-11189).

[0008] More than 20 AKAPs have been reported in different tissues and species. Complementary DNAs (cDNAs) encoding AKAPs have been isolated from diverse species, ranging from Caenorhabditis elegans and Drosophilia to human (see, e.g., Colledge and Scott (1999) Trends Cell Biol. 9:216-221). Regions within AKAPs that mediate association with RII subunits of PKA have been identified. These regions of approximately 10-18 amino acid residues vary substantially in primary sequence, but secondary structure predictions indicate that they are likely to form an amphipathic helix with hydrophobic residues aligned along one face of the helix and charged residues along the other (Carr et al. (1991) J. Biol. Chem. 266:14188-14192; Carr et al. (1992) J. Biol. Chem. 267:13376-13382). Hydrophobic amino acids with a long aliphatic side chain, e.g., valine, leucine or isoleucine, can participate in binding to RII subunits (Glantz et al. (1993) J. Biol. Chem. 268:12796-12804).

[0009] Many AKAPs also have the ability to bind to multiple proteins, including other signaling enzymes. For example, AKAP79 binds to PKA, protein kinase C (PKC) and the protein phosphatase calcineurin (PP2B) (Coghlan et al. (1995) Science 267:108-112 and Klauck et al. (1996) Science 271:1589-1592). Therefore, the targeting of AKAP79 to neuronal postsynaptic membranes brings together enzymes with opposite catalytic activities in a single complex.

[0010] AKAPs thus serve as potential regulatory mechanisms that increase the selectivity and intensity of a cAMP-mediated response. There is a need, therefore, to identify and elucidate the structural and functional properties of AKAPs in order to gain a complete understanding of the important role these proteins play in the basic functioning of cells.

### SUMMARY

[0011] Provided herein are methods for indicating increased susceptibility of a subject to a disease or disorder. The methods include assessment of the presence or absence of an allele of the an AKAP gene and other aspects, including determining EKG features, or methods in which the AKAP gene is predictive of treatment outcome or response. Methods provided herein include steps of conducting an EKG examination; determining the EKG-PR-interval in the subject. If the EKG-PR-interval is decreased, then identity of an amino acid present in the subject at position 646 of AKAP10/D-AKAP2 (SEQ ID NO:2) or a nucleotide present at position corresponding to nucleotide 2073 of SEQ ID NO:1 is assessed. The presence of Val at position 646 of SEQ ID NO:2 or the presence of a -G- at nucleotide position 2073 of SEQ ID NO:1, indicates increased susceptibility to a disease or disorder. The disease or disorder can be selected from among a variety of diseases and discorders, including, but are not limited to, cardiovascular disorders, cardiac disease, proliferative disorders, neurological disorders, neurodegenerative disorders, obesity, diabetes and peripheral retinopathies.

[0012] Also provided are methods for indicating increased susceptibility of a subject to a disease or disorder associated with the cardiovascular system, by conducting an EKG exam; determining the EKG-PR-interval in the subject, wherein, if the EKG-PR-interval is decreased, then determining the amino acid present at position 646 of AKAP10/D-AKAP2 (SEQ ID NO:2) or the nucleotide present at position corresponding to nucleotide 2073 of SEQ ID NO:1, wherein the presence of Val at position 646 of SEQ ID NO:2 or the presence of a -G- at nucleotide position 2073 of SEQ ID NO:1, indicates increased susceptibility to a disease or disorder associated with the cardiovascular system. The EKG-PR-interval in the subject can be compared to a predetermined age-matched standard EKG-PR-interval to determine whether it is decreased.

[0013] Also provided herein are methods of assessing the susceptibility of a subject to a disease or disorder associated with the cardiovascular system, the method comprising determining the amino acid at position 646 of AKAP10/D-AKAP2 (SEQ ID NO:2) or the nucleotide present at position corresponding to nucleotide 2073 of SEQ ID NO:1, wherein the presence of Val at position 646 of SEQ ID NO:2 or the presence of a -G- at nucleotide position 2073 of SEQ ID NO:1, indicates increased susceptibility to a disease or disorder associated with the cardiovascular system.

[0014] Also provided herein are methods of diagnosing a disease or disorder associated with the cardiovascular system, comprising detecting the presence of Val at 646 of D-AKAP2 (SEQ ID NO:2) or the presence of a G at a nucleotide position corresponding to nucleotide 2073 of SEQ ID NO:1, wherein the presence of Val at position 646 of SEQ ID NO:2 or the presence of a -G- at nucleotide position 2073 of SEQ ID NO:1, indicates the presence of a disease or disorder associated with the cardiovascular system. In these methods, the disease or disorder can be from among, but not limited to, one or more of the group consisting of: atrial fibrillation, sick sinus syndrome, sudden cardiac arrest, ventricular arrythmia, ventricular fibrillation, ventricular tachycardia, Wolf-Parkinson-White (WPW) Syndrome, Lown-Ganong-Levin (LGL) Syndrome, hypertension.

[0015] Provided herein are methods for determining responsiveness of a subject to one or more, β-blocking agents, comprising detecting for the subject the presence or absence of Val at position 646 of SEQ ID NO:2 or a -G- nucleotide at a position corresponding to position 2073 of SEQ ID NO: 1, wherein the presence of a Val at position 646 of SEQ ID NO:2 or a -G- at nucleotide 2073 of SEQ ID NO:1, is indicative of an increased likelihood that a subject has a modulated response to one or more β-blocking agents compared to a subject who does not have the allelic variant. In one embodiment, the modulated response is a decreased response to one or more β-blocking agents compared to a subject who does not have the allelic variant. In another embodiment, the decreased response is a non-response to one or more β-blocking agents compared to a subject who does not have the allelic variant. In yet another embodiment, the modulated response is an increased response to one or more β-blocking agents compared to a subject who does not have the allelic variant. The β-blocker can be an antagonist of a β-adrenergic receptor. In another embodiment, the, β-blocker is an agonist of a β-adrenergic receptor.

[0016] Also provided herein are methods for determining responsiveness of a subject to one or more β-blocking agents, comprising detecting the presence or absence of Val at position 646 of SEQ ID NO:2 or a -G- nucleotide at a position corresponding to position 2073 of SEQ ID NO: 1, wherein the presence of a Val at position 646 of SEQ ID NO:2 or a -G- at nucleotide 2073 of SEQ ID NO:1, is indicative of an increased likelihood that a subject has an increased response to one or more β-blocking agents compared to a subject who does not have the allelic variant.

[0017] Also provided herein, are methods for determining responsiveness of a subject to one or more β-blocking agents, comprising detecting for the subject the presence or absence of Val at position 646 of SEQ ID NO:2 or a -G- nucleotide at a position corresponding to position 2073 of SEQ ID NO: 1, wherein the presence of a Val at position 646 of SEQ ID NO:2 or a -G- at nucleotide 2073 of SEQ ID NO:1, is indicative of an increased likelihood that a subject is non-responsive to one or more β-blocking agents compared to a subject who does not have the allelic variant.

[0018] Also provided herein are methods for determining responsiveness of a subject to one or more β-blocking agents, comprising detecting the presence or absence of Val at position 646 of SEQ ID NO:2 or a -G- nucleotide at a position corresponding to position 2073 of SEQ ID NO: 1, wherein the presence of a Val at position 646 of SEQ ID NO:2 or a -G- at nucleotide 2073 of SEQ ID NO:1, is indicative of an increased likelihood that a subject is hyper-responsive to one or more β-blocking agents compared to a subject who does not have the allelic variant.

[0019] Provided herein are methods for indicating susceptibility of a subject to acquired long Q-T syndrome, comprising detecting the presence or absence of Val at position 646 of SEQ ID NO:2 or presence or absence of a -G- nucleotide at a position corresponding to position 2073 of SEQ ID NO: 1, wherein the presence of a Val at position 646 of SEQ ID NO:2 or a -G- at nucleotide 2073 of SEQ ID NO:1, is indicative of increased susceptibility to acquired long Q-T syndrome, compared to the susceptibility of a subject who does not have the allelic variant. In accordance with this embodiment, the detecting step can be effected by a method selected from the group consisting of allele specific hybridization, primer specific extension, oligonucleotide ligation assay, restriction enzyme site analysis and single-stranded conformation polymorphism analysis. Also provided herein, the detecting step can comprise mass spectrometry. Also provided herein, detection can be effected by detecting a signal moiety selected from the group consisting of radioisotopes, enzymes, antigens, antibodies, spectrophotometric reagents, chemiluminescent reagents, fluorescent reagents and other light producing reagents.

[0020] Also provided herein, are methods for indicating susceptibility to morbidity, increased or early mortality, or morbidity and increased or early mortality of a subject; comprising conducting an EKG exam; determining the EKG-PR-interval in the subject, wherein if the EKG-PR-interval is decreased; then determining the amino acid at position 646 of AKAP10/D-AKAP2 (SEQ ID NO:2) or the nucleotide present at position corresponding to nucleotide 2073 of SEQ ID NO:1, wherein the presence of Val at position 646 of SEQ ID NO:2 or the presence of a -G- at nucleotide position 2073 of SEQ ID NO:1, indicates increased susceptibility to morbidity, increased or early mortality, or morbidity and increased or early mortality of a subject.

[0021] In one embodiment of each of the methods provided herein, the subject is heterozygous -GA- at a position corresponding to nucleotide 2073 of SEQ ID NO:1 or heterozygous Val/Ile at a position corresponding to position 646 of SEQ ID NO:2. In another embodiment of each of the methods provided herein, the subject is homozygous -GG- at a position corresponding to nucleotide 2073 of SEQ ID NO:1 or homozygous Val/Val at a position corresponding to position 646 of SEQ ID NO:2.

[0022] Another non-synonymous D-AKAP2 variation retrieved from dbSNP has been verified. The G-A transversion in exon 4 results in an Arg to His substitution at position 249 of SEQ ID NO:2 (R249H; corresponding to a G to A transversion at nucleotide 883 of SEQ ID NO:1 encoding human D-AKAP2). The Arg at residue 249 of SEQ ID NO:2 was found to be in complete linkage disequilibrium with the Ile at position 646 of SEQ ID NO:646, occurring together in every case, and therefore shows the same age effect. Accordingly, in the each of the methods provided herein, where a subject is assayed for the genotype at position 2073 of SEQ ID NO:1, the subject can also be assayed for the genotype at position 883 of SEQ ID NO:1. The genotype -G- at position 883 of SEQ ID NO:1 corresponds to genotype -A- at nucleotide 2073 of SEQ ID NO:1 and vice versa. Likewise, in the methods provided herein the genotype -A- at position 883 of SEQ ID NO:1 corresponds to genotype -G- at nucleotide 2073 of SEQ ID NO:1 and vice versa. For amino acid residues, the detection of a Ile at residue 646 of SEQ ID NO:2 corresponds to detection of an Arg at residue 249 of SEQ ID NO:2 and vice versa. Likewise, the detection of a Val at residue 646 of SEQ ID NO:2 corresponds to detection of an His at residue 249 of SEQ ID NO:2 and vice versa.

[0023] Further provided are kits for practicing the methods. The kits can include reagents for assessing genotype of an AKAP allele and also reagents and/or components for conducting an EKG and/or a β-blocking agent. For example, a kit for assessing genotype can include a primer or probe that specifically hybridizes adjacent to or at a polymorphic region spanning a position corresponding to position 2073 of SEQ ID NO 1 or 3 of an AKAP10 allele or the complement thereof and a second primer or probe that specifically hybridizes adjacent to or at a polymorphic region spanning a position corresponding to positions selected from the group consisting of position 83587 of SEQ ID NO 13 or 17, position 129600 of SEQ ID NO 14 or 17, and position 156,277 of SEQ ID NO 18 or 17 of an AKAP10 allele or the complement thereof. Primers include, but are not limited to, nucleic acids consisting essentially of the nucleotide sequence of SEQ ID NO: 8, SEQ ID NO: 15, SEQ ID NO: 19 and SEQ ID NO 20. Other genotyping components of the kit can include a first primer or probe that specifically hybridizes adjacent to or at a polymorphic region spanning a position corresponding to position 883 of SEQ ID NO 1 or 3 of an AKAP10 allele or the complement thereof and a second primer or probe that specifically hybridizes adjacent to or at a polymorphic region spanning a position corresponding to positions selected from the group consisting of position 83587 of SEQ ID NO 13 or 17, position 129600 of SEQ ID NO 14 or 17, and position 156,277 of SEQ ID NO 18 or 17 of an AKAP10 allele or the complement thereof. The kits optionally contain instructions for performing assays, interpreting results or for aiding in peforming the methods. The kits also can include at least one didieoxynucleotide such as ddA, ddC, ddG.

### BRIEF DESCRIPTION OF THE FIGURES

[0024] FIG. 1 shows the results of an analysis of covariance that was conducted to test the effect of the genotypes on PR mean levels. Age was included as a covariate in the model, which was significantly associated with PR mean up to a third order polynomial. The relationship between age and PR mean was genotype-dependent, and therefore interaction terms between genotype and age were included. The predicted values from the resulting model are shown in FIG. 1 for each genotype.

### DETAILED DESCRIPTION

A. Definitions

[0025] Unless defined otherwise, all technical and scientific terms used herein have the same meaning as is commonly understood by one of skill in the art to which the invention(s) belong. All patents, patent applications, published applications and publications, GENBANK sequences, websites and other published materials referred to throughout the entire disclosure herein, unless noted otherwise, are incorporated by reference in their entirety. In the event that there are a plurality of definitions for terms herein, those in this section prevail. Where reference is made to a URL or other such identifier or address, it is understood that such identifiers can change and particular information on the internet can come and go, but equivalent information is known and can be readily accessed, such as by searching the internet and/or appropriate databases. Reference thereto evidences the availability and public dissemination of such information.

[0026] As used herein, the phrase “EKG examination” or “ECG examination” refers to the well-known electrocardiogram examination that generates an electrical recording of the heart and is conducted on human subjects to investigate heart function and heart disease.

[0027] As used herein, the phrase “PR-interval” or “EKG-PR-interval”, in the context of an electrocardiogram (EKG or ECG) analysis, is the time (typically expressed herein in units of milliseconds) elapsed between the beginning of the P wave to the beginning of the next QRS complex. It corresponds to the time lag from the onset of atrial depolarization to the onset of ventricular depolarization. This time lag allows atrial systole to occur, filling the ventricles before ventricular systole. Most of the delay occurs in the AV node. The PR interval is longer with high vagal tone. A prolonged PR interval corresponds to impaired AV conduction. The normal range of PR-intervals from about 120 to 200 milliseconds. It is well-known that each square on a EKG readout (graph) corresponds to 40 milliseconds.

[0028] As used herein the phrase “predetermined standard” refers to an average of a multiplicity of EKG-PR-intervals that can be empirically determined from a specifically chosen group of individuals. The group of individuals can be selected irrespective of disease status, e.g., from a healthy patient database. In another embodiment, the standard can be obtained from a group of control age-matched subjects that do not have a particular disease, such as heart disease. In another embodiment, the predetermined standard can be obtained from a known age-matched control that is homozygous -AA- at a position corresponding to nucleotide 2073 of SEQ ID NO:1 or homozygous Ile/Ile at a position corresponding to position 646 of SEQ ID NO:2.

[0029] As used herein “age-matched standard EKG-PR-interval” refers to the average PR-interval (also referred to herein as “PRmean”) for a multiplicity of subjects of the same age. In addition, the average PR-interval can be obtained from controls having the same genotype, such as -AA- homozygotes and/or -GA- heterozygotes at a position corresponding to nucleotide 2073 of SEQ ID NO:1. Accordingly, the EKG-PR-interval can be stratified by age and/or genotype. For example, the EKG-PR-interval of the subject being examined can be compared to PRmean of either: a group of control subjects of the same age having the -AA- homozygous genotype at a position corresponding to nucleotide 2073 of SEQ ID NO:1; a group of control subjects of the same age having the -GA- heterozygous genotype at a position corresponding to nucleotide 2073 of SEQ ID NO:1; both groups of control subjects of the same age having either the -AA- homozygous or the -GA- homozygous genotype at a position corresponding to nucleotide 2073 of SEQ ID NO:1. In another embodiment, the EKG-PR-interval of the subject being examined can be compared to the PRmean of a group of control subjects of the same age having any genotype at a position corresponding to nucleotide 2073 of SEQ ID NO:1.

[0030] As used herein, the phrase “disease or disorders” is meant to encompass all genetic or physiological irregularities that can be attributed to a particular body organ or physiological or cellular system. As used herein, the phrase “disorder or disease associated with a decreased EKG-PR-interval” or grammatical variations thereof, refers to any disease or disorder that exhibits a decreased PR-interval as one of its characteristics. Exemplary disorders and/or diseases contemplated herein as associated with decreased EKG-PR-intervals include, but are not limited to, those involving alterations in cellular protein phosphorylation and/or signal transduction. Among such disorders and diseases are: neurodegeneratives diseases, such as Alzheimer's Disease, cardiovascular disorders, cardiac disorders, particularly disorders associated with altered left ventricular function, cardiomyopathies, proliferative disorders, bipolar disorder and other neurological disorders, obesity, diabetes and certain peripheral retinopathies, such as retinitis pigmentosa. As used herein, cardiovascular disorders or cardiac disease collectively encompass all cardiovascular abnormalities, such as, but not limited to congenital heart disease, cardiac arrhythmia, brachycardia, atrial fibrillation, sick sinus syndrome, sudden cardiac arrest, ventricular arrythmia, ventricular fibrillation, ventricular tachycardia, Wolf-Parkinson-White (WPW) Syndrome, Lown-Ganong-Levin (LGL) Syndrome, hypertension, familial cardiac myxomas and Carney complex.

[0031] As used herein, a “decreased” EKG-PR-interval or grammatical variations thereof, refers to a PR-interval that is lower than the average PR-interval (e.g., PRmean) for subjects of the same age group. As set forth herein (e.g., FIG. 1) the average PR-interval (e.g., PRmean) increases with age for subjects having either a homozygous -AA- or heterozygous -GA- genotype at a position corresponding to nucleotide 2073 of SEQ ID NO:1 encoding the AKAP10/D-AKAP2 protein. For subjects (e.g., humans) having the homozygous -GG- genotype at a position corresponding to nucleotide 2073 of SEQ ID NO:1, it has been found herein that the average PR-interval is decreased relative to subjects of the same age that have either a homozygous -AA- or heterozygous -GA- genotype. The decreased EKG-PR-interval is evident in subjects from the age of about 40 up to about 70 years of age.

[0032] In addition, although the average PR-interval for the -GA- heterozygotes increases with age as with the -AA- homozygotes, the average PR-interval (e.g., PRmean) is always lower for the -GA- heteroaygotes than for the -AA- homozygotes (see FIG. 1). Accordingly, in one embodiment, the EKG-PR-interval of the subject being examined is compared to the PRmean (e.g., average PR-interval) of age-matched -AA- homozygotes. This embodiment serves as a preliminary screen for subjects that have either 1 or 2 copies of the 1646V variant (e.g., screen for potential -GA- heterozygotes or -AA- homozygotes at a nucleotide position corresponding to nucleotide 2073 of SEQ ID NO:1). In another embodiment, the EKG-PR-interval of the subject being examined is compared to the PRmean (e.g., average PR-interval) of age-matched -GA- heterozygotes. This embodiment serves as preliminary screen for subjects that have 2 copies of the I646V variant, e.g., subjects that are -GG- homozygotes.

[0033] In the methods provided herein, if the EKG-PR-interval is not decreased relative to the age-matched average PR-interval (PRmean) for -AA- homozygotes and/or -GA- heterozygotes at a position corresponding to nucleotide 2073 of SEQ ID NO:1, then there is no need to determine the genotype of the subject.

[0034] As used herein, a Q-T interval is the time from electrocardiogram Q wave to the end of the T wave corresponding to electrical systole. This interval represents the time required for depolarization and repolarization to occur. In long QT syndrome, the duration of repolarization is longer than normal. Thus, the QT-interval is prolonged. An interval above 440 milliseconds (msec) is considered prolonged. An interval at or above 480 milliseconds in females or 470 milliseconds in males typically is sufficient to diagnose a subject as having long QT syndrome.

[0035] As used herein, sequencing refers to the process of determining a nucleotide sequence and can be performed using any method known to those of skill in the art. For example, if a polymorphism is identified or known, and it is desired to assess its frequency or presence in nucleic acid samples taken from the subjects that comprise the database, the region of interest from the samples can be isolated, such as by PCR or restriction fragments, hybridization or other suitable method known to those of skill in the art, and sequenced. For purposes herein, sequencing analysis can be carried out using mass spectrometry (see, e.g., U.S. Pat. Nos. 5,547,835, 5,622,824, 5,851,765, and 5,928,906). Nucleic acids can also be sequenced by hybridization (see, e.g., U.S. Pat. Nos. 5,503,980, 5,631,134, 5,795,714) and including analysis by mass spectrometry (see, U.S. application Ser. Nos. 08/419,994 and 09/395,409). Alternatively, sequencing can be performed using other known methods, such as set forth in U.S. Pat. Nos. 5,525,464; 5,695,940; 5,834,189; 5,869,242; 5,876,934; 5,908,755; 5,912,118; 5,952,174; 5,976,802; 5,981,186; 5,998,143; 6,004,744; 6,017,702; 6,018,041; 6,025,136; 6,046,005; 6,087,095; 6,117,634, 6,013,431, WO 98/30883; WO 98/56954; WO 99/09218; WO/00/58519, and the others.

[0036] As used herein, “polymorphism” refers to the coexistence of more than one form of a gene or portion thereof. A portion of a gene of which there are at least two different forms, i.e., two different nucleotide sequences, is referred to as a “polymorphic region of a gene”. A polymorphic region can be a single nucleotide, the identity of which differs in different alleles. A polymorphic region can also be several nucleotides in length.

[0037] As used herein, “polymorphic gene” refers to a gene having at least one polymorphic region.

[0038] As used herein, “allele”, which is used interchangeably herein with “allelic variant” refers to alternative forms of a gene or portions thereof. Alleles occupy the same locus or position on homologous chromosomes. When a subject has two identical alleles of a gene, the subject is the to be homozygous for the gene or allele. When a subject has two different alleles of a gene, the subject is the to be heterozygous for the gene. Alleles of a specific gene can differ from each other in a single nucleotide, or several nucleotides, and can include substitutions, deletions, and insertions of nucleotides. An allele of a gene can also be a form of a gene containing a mutation.

[0039] As used herein, “predominant allele” refers to an allele that is represented in the greatest frequency for a given population. The allele or alleles that are present in lesser frequency are referred to as allelic variants.

[0040] As used herein, “associated” refers to coincidence with the development or manifestation of a disease, condition or phenotype. Association can be due to, but is not limited to, genes responsible for housekeeping functions whose alteration can provide the foundation for a variety of diseases and conditions, those that are part of a pathway that is involved in a specific disease, condition or phenotype and those that indirectly contribute to the manifestation of a disease, condition or phenotype.

[0041] As used herein, the term “subject” refers to mammals and in particular human beings.

[0042] As used herein, the term “gene” or “recombinant gene” refers to a nucleic acid molecule comprising an open reading frame and including at least one exon and (optionally) an intron sequence. A gene can be either RNA or DNA. Genes can include regions preceding and following the coding region (leader and trailer).

[0043] As used herein, “intron” refers to a DNA sequence present in a given gene which is spliced out during mRNA maturation.

[0044] As used herein, “nucleotide sequence complementary to the nucleotide sequence set forth in SEQ ID NO: x” refers to the nucleotide sequence of the complementary strand of a nucleic acid strand having SEQ ID NO: x. The term “complementary strand” is used herein interchangeably with the term “complement”. The complement of a nucleic acid strand can be the complement of a coding strand or the complement of a non-coding strand. When referring to double stranded nucleic acids, the complement of a nucleic acid having SEQ ID NO: x refers to the complementary strand of the strand having SEQ ID NO: x or to any nucleic acid having the nucleotide sequence of the complementary strand of SEQ ID NO: x. When referring to a single stranded nucleic acid having the nucleotide sequence SEQ ID NO: x, the complement of this nucleic acid is a nucleic acid having a nucleotide sequence which is complementary to that of SEQ ID NO: x.

[0045] As used herein, the term “coding sequence” refers to that portion of a gene that encodes an amino acid sequence of a protein.

[0046] As used herein, the term “sense strand” refers to that strand of a double-stranded nucleic acid molecule that has the sequence of the mRNA that encodes the amino acid sequence encoded by the double-stranded nucleic acid molecule.

[0047] As used herein, the term “antisense strand” refers to that strand of a double-stranded nucleic acid molecule that is the complement of the sequence of the mRNA that encodes the amino acid sequence encoded by the double-stranded nucleic acid molecule.

[0048] As used herein, the amino acids, which occur in the various amino acid sequences appearing herein, are identified according to their well-known, three-letter or one-letter abbreviations. The nucleotides, which occur in the various DNA fragments, are designated with the standard single-letter designations used routinely in the art (see, Table 1).

[0049] As used herein, amino acid residue refers to an amino acid formed upon chemical digestion (hydrolysis) of a polypeptide at its peptide linkages. The amino acid residues described herein are typically in the “L” isomeric form. Residues in the “D” isomeric form can be substituted for any L-amino acid residue, as long as the desired functional property is retained by the polypeptide. NH₂ refers to the free amino group present at the amino terminus of a polypeptide. COOH refers to the free carboxy group present at the carboxyl terminus of a polypeptide. In keeping with standard polypeptide nomenclature described in J. Biol. Chem., 243:3552-59 (1969) and adopted at 37 C.F.R. §§1.821-1.822, abbreviations for amino acid residues are shown in the following Table:

TABLE 1
Table of Correspondence

SYMBOL

| | | |
|---|---|---|
| 1-Letter | 3-Letter | AMINO ACID |

| | | |
|---|---|---|
| Y | Tyr | tyrosine |
| G | Gly | glycine |
| F | Phe | phenylalanine |
| M | Met | methionine |
| A | Ala | alanine |
| S | Ser | serine |
| I | Ile | isoleucine |
| L | Leu | leucine |
| T | Thr | threonine |
| V | Val | valine |
| P | Pro | proline |
| K | Lys | lysine |
| H | His | histidine |
| Q | Gln | glutamine |
| E | Glu | glutamic acid |
| Z | Glx | Glu and/or Gln |
| W | Trp | tryptophan |
| R | Arg | arginine |
| D | Asp | aspartic acid |
| N | Asn | asparagine |
| B | Asx | Asn and/or Asp |
| C | Cys | cysteine |
| X | Xaa | Unknown or other |

[0050] It should be noted that all amino acid residue sequences represented herein by formulae have a left to right orientation in the conventional direction of amino-terminus to carboxyl-terminus. In addition, the phrase “amino acid residue” is broadly defined to include the amino acids listed in the Table of Correspondence and modified and unusual amino acids, such as those referred to in 37 C.F.R. §§1.821-1.822, and incorporated herein by reference. Furthermore, it should be noted that a dash at the beginning or end of an amino acid residue sequence indicates a peptide bond to a further sequence of one or more amino acid residues or to an amino-terminal group such as NH₂ or to a carboxyl-terminal group such as COOH.

[0051] In a peptide or protein, suitable conservative substitutions of amino acids are known to those of skill in this art and can be made generally without altering the biological activity of the resulting molecule. Those of skill in this art recognize that, in general, single amino acid substitutions in non-essential regions of a polypeptide do not substantially alter biological activity (see, e.g., Watson et al. Molecular Biology of the Gene, 4th Edition, 1987, The Benjamin/Cummings Pub. co., p. 224).

[0052] Such substitutions are typically made in accordance with those set forth in TABLE 2 as follows:

TABLE 2

| | |
|---|---|
| Original residue | Conservative substitution |

| | |
|---|---|
| Ala (A) | Gly; Ser |
| Arg (R) | Lys |
| Asn (N) | Gln; His |
| Cys (C) | Ser |
| Gln (Q) | Asn |
| Glu (E) | Asp |
| Gly (G) | Ala; Pro |
| His (H) | Asn; Gln |
| Ile (I) | Leu; Val |
| Leu (L) | Ile; Val |
| Lys (K) | Arg; Gln; Glu |
| Met (M) | Leu; Tyr; Ile |
| Phe (F) | Met; Leu; Tyr |
| Ser (S) | Thr |
| Thr (T) | Ser |
| Trp (W) | Tyr |
| Tyr (Y) | Trp; Phe |
| Val (V) | Ile; Leu |

Other substitutions are also permissible and can be determined empirically or in accord with known conservative substitutions.

[0053] As used herein, a DNA or nucleic acid homolog refers to a nucleic acid that includes a preselected conserved nucleotide sequence, such as a sequence encoding a therapeutic polypeptide. By the term “substantially homologous” is meant having at least 80%, typically at least 90%, or at least 95% homology therewith or a less percentage of homology or identity and conserved biological activity or function.

[0054] The terms “homology” and “identity” are often used interchangeably. In this regard, percent homology or identity can be determined, for example, by comparing sequence information using a GAP computer program. The GAP program uses the alignment method of Needleman and Wunsch (J. Mol. Biol. 48:443 (1970), as revised by Smith and Waterman (Adv. Appl. Math. 2:482 (1981). Briefly, the GAP program defines similarity as the number of aligned symbols (i.e., nucleotides or amino acids) which are similar, divided by the total number of symbols in the shorter of the two sequences. The default parameters for the GAP program can include: (1) a unary comparison matrix (containing a value of 1 for identities and 0 for non-identities) and the weighted comparison matrix of Gribskov and Burgess, Nucl. Acids Res. 14:6745 (1986), as described by Schwartz and Dayhoff, eds., ATLAS OF PROTEIN SEQUENCE AND STRUCTURE, National Biomedical Research Foundation, pp. 353-358 (1979); (2) a penalty of 3.0 for each gap and an additional 0.10 penalty for each symbol in each gap; and (3) no penalty for end gaps.

[0055] Whether any two nucleic acid molecules have nucleotide sequences that are at least 80%, 85%, 90%, 95%, 96%, 97%, 98% or 99% “identical” can be determined using known computer algorithms such as the “FAST A” program, using for example, the default parameters as in Pearson and Lipman, Proc. Natl. Acad. Sci. USA 85:2444 (1988). Alternatively the BLAST function of the National Center for Biotechnology Information database can be used to determine identity

[0056] In general, sequences are aligned so that the highest order match is obtained. “Identity” per se has an art-recognized meaning and can be calculated using published techniques. (See, e.g.: Computational Molecular Biology, Lesk, A. M., ed., Oxford University Press, New York, 1988; Biocomputing: Informatics and Genome Projects, Smith, D. W., ed., Academic Press, New York, 1993; Computer Analysis of Sequence Data, Part I, Griffin, A. M., and Griffin, H. G., eds., Humana Press, New Jersey, 1994; Sequence Analysis in Molecular Biology, von Heinje, G., Academic Press, 1987; and Sequence Analysis Primer, Gribskov, M. and Devereux, J., eds., M Stockton Press, New York, 1991). While there exist a number of methods to measure identity between two polynucleotide or polypeptide sequences, the term “identity” is well known to skilled artisans (Carillo, H. & Lipton, D., SIAM J Applied Math 48:1073 (1988)). Methods commonly employed to determine identity or similarity between two sequences include, but are not limited to, those disclosed in Guide to Huge Computers, Martin J. Bishop, ed., Academic Press, San Diego, 1994, and Carillo, H. & Lipton, D., SIAM J Applied Math 48:1073 (1988). Methods to determine identity and similarity are codified in computer programs. Typical computer program methods to determine identity and similarity between two sequences include, but are not limited to, GCG program package (Devereux, J., et al., Nucleic Acids Research 12(I):387 (1984)), BLASTP, BLASTN, FASTA (Atschul, S. F., et al., J Molec Biol 215:403 (1990)).

[0057] Therefore, as used herein, the term “identity” represents a comparison between a test and a reference polypeptide or polynucleotide. For example, a test polypeptide can be defined as any polypeptide that is 90% or more identical to a reference polypeptide.

[0058] As used herein, the term at least “90% identical to” refers to percent identities from 90 to 99.99 relative to the reference polypeptides. Identity at a level of 90% or more is indicative of the fact that, assuming for exemplification purposes a test and reference polypeptide length of 100 amino acids are compared. No more than 10% (i.e., 10 out of 100) amino acids in the test polypeptide differs from that of the reference polypeptides. Similar comparisons can be made between a test and reference polynucleotides. Such differences can be represented as point mutations randomly distributed over the entire length of an amino acid sequence or they can be clustered in one or more locations of varying length up to the maximum allowable, e.g. 10/100 amino acid difference (approximately 90% identity). Differences are defined as nucleic acid or amino acid substitutions, or deletions.

[0059] As used herein, stringency conditions refer to the washing conditions for removing the non-specific probes and conditions that are equivalent to either high, medium, or low stringency as described below:

| | |
|---|---|
| 1) high stringency: | 0.1 × SSPE, 0.1% SDS, 65° C. |
| 2) medium stringency: | 0.2 × SSPE, 0.1% SDS, 50° C. |
| 3) low stringency: | 1.0 × SSPE, 0.1% SDS, 50° C. |

It is understood that equivalent stringencies can be achieved using alternative buffers, salts and temperatures.

[0060] As used herein, “heterologous DNA” is DNA that encodes RNA and proteins that are not normally produced in vivo by the cell in which it is expressed or that mediates or encodes mediators that alter expression of endogenous DNA by affecting transcription, translation, or other regulatable biochemical processes or is not present in the exact orientation or position as the counterpart DNA in a wildtype cell. Heterologous DNA can also be referred to as foreign DNA. Any DNA that one of skill in the art would recognize or consider as heterologous or foreign to the cell in which is expressed is herein encompassed by heterologous DNA. Examples of heterologous DNA include, but are not limited to, DNA that encodes traceable marker proteins, such as a protein that confers drug resistance, DNA that encodes therapeutically effective substances, such as anti-cancer agents, enzymes and hormones, and DNA that encodes other types of proteins, such as antibodies. Antibodies that are encoded by heterologous DNA can be secreted or expressed on the surface of the cell in which the heterologous DNA has been introduced.

[0061] As used herein, isolated with reference to a nucleic acid molecule or polypeptide or other biomolecule means that the nucleic acid or polypeptide has separated from the genetic environment from which the polypeptide or nucleic acid were obtained. It can also mean altered from the natural state. For example, a polynucleotide or a polypeptide naturally present in a living animal is not “isolated,” but the same polynucleotide or polypeptide separated from the coexisting materials of its natural state is “isolated”, as the term is employed herein. Thus, a polypeptide or polynucleotide produced and/or contained within a recombinant host cell is considered isolated. Also intended as an “isolated polypeptide” or an “isolated polynucleotide” are polypeptides or polynucleotides that have been purified, partially or substantially, from a recombinant host cell or from a native source. For example, a recombinantly produced version of a compound can be substantially purified by the one-step method described in Smith and Johnson, Gene 67:31-40 (1988). The terms isolated and purified are sometimes used interchangeably.

[0062] Thus, by “isolated” is meant that the nucleic acid is free of the coding sequences of those genes that, in the naturally-occurring genome of the organism (if any) immediately flank the gene encoding the nucleic acid of interest. Isolated DNA can be single-stranded or double-stranded, and can be genomic DNA, cDNA, recombinant hybrid DNA, or synthetic DNA. It can be identical to a native DNA sequence, or can differ from such sequence by the deletion, addition, or substitution of one or more nucleotides.

[0063] Isolated or purified as it refers to preparations made from biological cells or hosts means any cell extract containing the indicated DNA or protein including a crude extract of the DNA or protein of interest. For example, in the case of a protein, a purified preparation can be obtained following an individual technique or a series of preparative or biochemical techniques and the DNA or protein of interest can be present at various degrees of purity in these preparations. The procedures can include for example, but are not limited to, ammonium sulfate fractionation, gel filtration, ion exchange change chromatography, affinity chromatography, density gradient centrifugation and electrophoresis.

[0064] A preparation of DNA or protein that is “substantially pure” or “isolated” should be understood to mean a preparation free from naturally occurring materials with which such DNA or protein is normally associated in nature. “Essentially pure” should be understood to mean a “highly” purified preparation that contains at least 95% of the DNA or protein of interest.

[0065] A cell extract that contains the DNA or protein of interest should be understood to mean a homogenate preparation or cell-free preparation obtained from cells that express the protein or contain the DNA of interest. The term “cell extract” is intended to include culture media, especially spent culture media from which the cells have been removed.

[0066] As used herein, receptor refers to a biologically active molecule that specifically binds to (or with) other molecules. The term “receptor protein” can be used to more specifically indicate the proteinaceous nature of a specific receptor.

[0067] As used herein, recombinant refers to any progeny formed as the result of genetic engineering.

[0068] As used herein, a promoter region refers to the portion of DNA of a gene that controls transcription of the DNA to which it is operatively linked. The promoter region includes specific sequences of DNA that are sufficient for RNA polymerase recognition, binding and transcription initiation. This portion of the promoter region is referred to as the promoter. In addition, the promoter region includes sequences that modulate this recognition, binding and transcription initiation activity of the RNA polymerase. These sequences can be cis acting or can be responsive to trans acting factors. Promoters, depending upon the nature of the regulation, can be constitutive or regulated.

[0069] As used herein, the phrase “operatively linked” generally means the sequences or segments have been covalently joined into one piece of DNA, whether in single or double stranded form, whereby control or regulatory sequences on one segment control or permit expression or replication or other such control of other segments. The two segments are not necessarily contiguous. For gene expression a DNA sequence and a regulatory sequence(s) are connected in such a way to control or permit gene expression when the appropriate molecular, e.g., transcriptional activator proteins, are bound to the regulatory sequence(s).

[0070] As used herein, production by recombinant means by using recombinant DNA methods means the use of the well known methods of molecular biology for expressing proteins encoded by cloned DNA, including cloning expression of genes and methods, such as gene shuffling and phage display with screening for desired specificities.

[0071] As used herein, the term “conjugated” refers stable attachment, such ionic or covalent attachment.

[0072] As used herein, a composition refers to any mixture of two or more products or compounds. It can be a solution, a suspension, liquid, powder, a paste, aqueous, non-aqueous or any combination thereof.

[0073] As used herein, a combination refers to any association between two or more items.

[0074] As used herein, substantially identical to a product means sufficiently similar so that the property of interest is sufficiently unchanged so that the substantially identical product can be used in place of the product.

[0075] As used herein, the term “vector” refers to a nucleic acid molecule capable of transporting another nucleic acid to which it has been linked. One typical vector is an episome, i.e., a nucleic acid capable of extra-chromosomal replication. Typical vectors are those capable of autonomous replication and/or expression of nucleic acids to which they are linked. Vectors capable of directing the expression of genes to which they are operatively linked are referred to herein as “expression vectors”. In general, expression vectors of utility in recombinant DNA techniques are often in the form of “plasmids” which refer generally to circular double stranded DNA loops which, in their vector form are not bound to the chromosome. “Plasmid” and “vector” are used interchangeably as the plasmid is the most commonly used form of vector. Other such other forms of expression vectors that serve equivalent functions and that become known in the art subsequently hereto.

[0076] As used herein, “indicating” or “determining” means that the presence or absence of an allelic variant can be one of many factors that are considered when a subject's predisposition to a disease or disorder is evaluated. Thus a predisposition to a disease or disorder is not necessarily conclusively determined by only ascertaining the presence or absence of one or more allelic variants, but the presence of one of more of such variants is among a number of factors considered.

[0077] As used herein, “predisposition to develop a disease or disorder” means that a subject having a particular genotype and/or haplotype has a higher likelihood than one not having such a genotype and/or haplotype for developing a particular disease or disorder.

[0078] As used herein, “morbidity” refers to conditions, such as diseases or disorders, that compromise the health and well-being of an organism, such as an animal. Morbidity susceptibility or morbidity-associated genes are genes that, when altered, for example, by a variation in nucleotide sequence, facilitate the expression of a specific disease clinical phenotype. Thus, morbidity susceptibility genes have the potential, upon alteration, of increasing the likelihood or general risk that an organism will develop a specific disease.

[0079] As used herein, “mortality” refers to the statistical likelihood that an organism, particularly an animal, will not survive a full predicted lifespan. Hence, a trait or a marker, such as a polymorphism, associated with increased mortality is observed at a lower frequency in older than younger segments of a population.

[0080] As used herein, “transgenic animal” refers to any animal, typically a non-human animal, e.g. a mammal, bird or an amphibian, in which one or more of the cells of the animal contain heterologous nucleic acid introduced by way of human intervention, such as by transgenic techniques well known in the art. The nucleic acid is introduced into the cell, directly or indirectly by introduction into a precursor of the cell, by way of deliberate genetic manipulation, such as by microinjection or by infection with a recombinant virus. The term genetic manipulation does not include classical cross-breeding, or in vitro fertilization, but rather is directed to the introduction of a recombinant DNA molecule. This molecule can be integrated within a chromosome, or it can be extrachromosomally replicating DNA. In the typical transgenic animals described herein, the transgene causes cells to express a recombinant form of a protein. Transgenic animals in which the recombinant gene is silent are also contemplated, as for example, using the FLP or CRE recombinase dependent constructs. Moreover, “transgenic animal” also includes those recombinant animals in which gene disruption of one or more genes is caused by human intervention, including recombination and antisense techniques.

[0081] As used herein, “target nucleic acid” refers to a nucleic acid molecule which contains all or a portion of a polymorphic region of a gene of interest.

[0082] As used herein, “signal moiety” refers to any moiety that allows for the detection of a nucleic acid molecule. Included are moieties covalently attached to nucleic acids and those that are not.

[0083] As used herein, “molecule that modulates or effects the biological activity of an AKAP10 protein” refers to any drug, small molecule, nucleic acid (sense and antisense), ribozyme, protein, peptide, lipid, carbohydrate etc. or combination thereof, that directly or indirectly changes, alters, abolishes, increases or decreases a biological activity attributed to AKAP10 protein.

[0084] As used herein, “biological activity of an AKAP10 protein” refers to, but is not limited to, binding of AKAP10 to protein kinase A or its subunits, localization of AKAP10 protein to a subcellular site, e.g., the mitochondria, localization of protein kinase A to the mitochondria and binding of AKAP10 protein to other proteins including other signaling enzymes.

[0085] As used herein, “combining” refers to contacting the biologically active agent with a cell or animal such that the agent is introduced into the cell or animal. For a cell any method that results in an agent traversing the plasma membrane is useful. For an animal any of the standard routes of administration of an agent, e.g. oral, rectal, transmucosal, intestinal, intravenous, intraperitoneal, intraventricular, subcutaneous, intramuscular, etc., can be used.

[0086] As used herein, a composition refers to any mixture. It can be a solution, a suspension, liquid, powder, a paste, aqueous, non-aqueous or any combination thereof.

[0087] As used herein, a combination refers to any association between two or among more items.

[0088] As used herein, “kit” refers to a package that contains a combination, such as one or more primers or probes used to amplify or detect polymorphic regions of AKAP10 genes, optionally including instructions and/or reagents for their use.

[0089] As used herein, “solid support” refers to a support substrate or matrix, such as silica, polymeric materials or glass. At least one surface of the support can be partially planar. Regions of the support can be physically separated, for example with trenches, grooves, well or the like. Some examples of solid supports include slides and beads. Supports are of such composition so as to allow for the immobilization or attachment of nucleic acids and other molecules such that these molecules retain their binding ability.

[0090] As used herein, “array” refers to a collection of elements, such as nucleic acids, containing three or more members. An addressable array is one in which the members of the array are identifiable, typically by position on a solid support. Hence, in general the members of the array will be immobilized to discrete identifiable loci on the surface of a solid phase.

[0091] As used herein, “specifically hybridizes” refers to hybridization of a probe or primer only to a target sequence preferentially to a non-target sequence. Those of skill in the art are familiar with parameters that affect hybridization; such as temperature, probe or primer length and composition, buffer composition and salt concentration and can readily adjust these parameters to achieve specific hybridization of a nucleic acid to a target sequence.

[0092] As used herein “nucleic acid” refers to polynucleotides such as deoxyribonucleic acid (DNA) and ribonucleic acid (RNA). The term should also be understood to include, as equivalents, derivatives, variants and analogs of either RNA or DNA made from nucleotide analogs, single (sense or antisense) and double-stranded polynucleotides. Deoxyribonucleotides include deoxyadenosine, deoxycytidine, deoxyguanosine and deoxythymidine. For RNA, the uracil base is uridine.

[0093] As used herein, “mass spectrometry” encompasses any suitable mass spectrometric format known to those of skill in the art. Such formats include, but are not limited to, Matrix-Assisted Laser Desorption/Ionization, Time-of-Flight (MALDI-TOF), Electrospray (ES), IR-MALDI (see, e.g., published International PCT Application No. WO 99/57318 and U.S. Pat. No. 5,118,937) Ion Cyclotron Resonance (ICR), Fourier Transform and combinations thereof. MALDI, particular UV and IR, are among the typical formats.

[0094] As used herein, “at a position corresponding to” refers to a position of interest (i.e., base number or residue number) in a nucleic acid molecule or protein relative to the position in another reference nucleic acid molecule or protein. Corresponding positions can be determined by comparing and aligning sequences to maximize the number of matching nucleotides or residues, for example, such that identity between the sequences is greater than 95%, greater than 96%, greater than 97%, greater than 98%, or greater than 99%. The position of interest is then given the number assigned in the reference nucleic acid molecule. For example, it is shown herein that a particular polymorphism in AKAP10 occurs at nucleotide 2073 of SEQ ID No. 1. To identify the corresponding nucleotide in another allele or isolate, the sequences are aligned and then the position that lines up with 2073 is identified. Since various alleles can be of different length, the position designate 2073 can not be nucleotide 2073, but instead is at a position that “corresponds” to the position in the reference sequence.

[0095] As used herein, “primer” and “probe” refer to a nucleic acid molecule including DNA, RNA and analogs thereof, including protein nucleic acids (PNA), and mixtures thereof. Such molecules are typically of a length such that they are statistically unique (i.e., occur only once) in the genome of interest. Generally, for a probe or primer to be unique in the human genome, it contains at least 14, 16 or contiguous nucleotides of a sequence complementary to or identical to a gene of interest. Probes and primers can be 10, 20, 30, 50, 100 or more nucleic acids long.

[0096] As used herein, “antisense nucleic acid molecule” refers to a molecule encoding a sequence complementary to at least a portion of an RNA molecule. The sequence is sufficiently complementary to be able to hybridize with the RNA, typically under moderate or high stringency conditions to form a stable duplex. The ability to hybridize depends on the degree of complementarity and the length of the antisense nucleic acid. Generally, the longer the hybridizing nucleic acid, the more base mismatches with an RNA it can contain and still form a stable duplex. One skilled in the art can ascertain a tolerable degree of mismatch by use of standard procedures to determine the melting point of the hybridized complex.

[0097] As used herein, a “variant protein” refers to a protein encoded by an allelic variant of a AKAP10 gene which results in a change of an amino acid residue at a particular position relative to that position in the protein encoded by the predominant allele.

[0098] As used herein, “signal transduction” refers to the propagation of a signal. In general, an extracellular signal is transmitted through the cell membrane to become an intracellular signal. This signal can then stimulate a cellular response. The term also encompasses signals that are propagated entirely within a cell. The polypeptide molecules involved in signal transduction processes are typically receptor and non-receptor protein kinases, receptor and non-receptor protein phosphatases, nucleotide exchange factors and transcription factors. One of the key biochemical mechanisms involved in signal transduction is protein phosphorylation. AKAP10 proteins are involved in signal transduction as they bind to protein kinase A (PKA) and are though to anchor the kinase at a location, e.g., the mitochondria, where PKA acts to phosphorylate a specific substrate. Thus, an alteration in AKAP10 binding to PKA, localization to the mitochondria, or phosphorylation by PKA, among other steps will result in an alteration in signal transduction. Assays including those that determine phosphorylation by PKA, association of PKA and AKAP10 and localization of AKAP10 can be used to monitor the state of signal transduction.

[0099] As used herein, “adjacent” refers to a position 5′ to the site of a single nucleotide polymorphism (SNP) such that there could be unpaired nucleotides between that position and the site of the SNP.

[0100] As used herein, “immediately adjacent” refers to a position 5′ to the site of a single nucleotide polymorphism (SNP) such that there are no unpaired nucleotides between that position and the site of the SNP.

[0101] As used herein, “binding to PKA”, refers to the interaction of the PKA binding domain of an AKAP10 protein and the regulatory subunits RI and/or RII of the protein kinase A holoenzyme.

B. Methods Employing Polymorphic AKAPs

[0102] Methods herein include a step a identifying the prescence of a particular allele of an A-kinase anchoring protein (AKAP) genes. Thus, polymorphic sequences encoding an A-kinase anchoring protein (AKAP) genes and polymorphic AKAP proteins encoded by polymorphic AKAP gene sequences are used in methods provided herein. These polymorphic sequences are based on differences in AKAP genes within and among different organisms, including humans.

[0103] Polymorphisms of the genome can lead to altered gene function, protein function or mRNA instability. AKAPs provide a mechanism for regulating ubiquitous cAMP-dependent kinase (PKA) activity by tethering PKA to specific subcellular locations thereby segregating it with particular components in a given signaling pathway and contributing to specificity in cellular responses to extracellular signals. AKAPs thus play a fundamental role in the basic functioning of cells, the response of cells to their environment and ultimately in the coordination of vital systems within an organism. Therefore, polymorphisms in AKAP gene sequences can affect the proper functioning of cells and systems within organisms and could be directly linked with certain disorders or could predispose an organism to a variety of diseases and disorders, especially those involving alterations in cellular protein phosphorylation and/or signal transduction. Among such disorders and diseases include, but are not limited to, neurodegeneratives diseases, such as Alzheimer's Disease, cardiovascular disorders, cardiac disorders, particularly disorders associated with altered left ventricular function, cardiomyopathies, proliferative disorders, bipolar disorder and other neurological disorders, obesity, diabetes and certain peripheral retinopathies, such as retinitis pigmentosa. AKAP gene polymorphisms, such as those described herein, provides for the identification and development of diagnostic and prognostic methods, also provided herein, and the development of drug therapies and treatment regimens. Furthermore, polymorphisms of AKAP genes aid in the study of AKAP protein structure and function, which also contributes to the development of diagnostic methods and therapies.

[0104] 1. AKAP10

[0105] The AKAP10 protein is primarily located in mitochondria. The sequence of a human AKAP10 cDNA (also referred to as D-AKAP2) is available in the GenBank database, at accession numbers AF037439 and NM 007202, and is provided in SEQ. ID. NO:1. The AKAP10 gene is located on chromosome 17.

[0106] The sequence of a mouse D-AKAP2 cDNA is also available in the GenBank database (see accession number AF021833). The mouse D-AKAP2 protein contains an RGS domain near the amino terminus that is characteristic of proteins that interact with Gα subunits and possess GTPase activating protein-like activity (Huang et al. (1997) Proc. Natl. Acad. Sci. U.S.A. 94:11184-11189). The human AKAP10 protein also has sequences homologous to RGS domains. The carboxy-terminal 40 residues of the mouse D-AKAP2 protein are responsible for the interaction with the regulatory subunits of PKA. This sequence is fairly well conserved between the mouse D-AKAP2 and human AKAP10 proteins.

[0107] 2. Polymorphisms of the Human AKAP10 Gene and Polymorphic AKAP10 Proteins

[0108] Polymorphisms of AKAP genes that alter gene expression, regulation, protein structure and/or protein function are more likely to have a significant effect on the regulation of enzyme (particularly PKA) activity, cellular transduction of signals and responses thereto and on the basic functioning of cells than polymorphisms that do not alter gene and/or protein function. Included in the polymorphic AKAPs provided herein are human AKAP10 proteins containing differing amino acid residues at position number 646 of SEQ. ID. No. 2.

[0109] Amino acid 646 of the human AKAP10 protein (SEQ. ID. NO: 2) is located in the carboxy-terminal region of the protein within a segment that participates in the binding of R-subunits of PKAs. This segment includes the carboxy-terminal 40 amino acids.

[0110] The amino acid residue reported for position 646 of the human AKAP10 protein is an isoleucine. Polymorphic human AKAP10 proteins provided herein have the amino acid sequence set forth in SEQ. ID. NO: 2 but contain residues other than isoleucine at amino acid position 646 of the protein. In particular embodiments of the polymorphic human AKAP10 proteins provided herein, the amino acid at position 646 of SEQ. ID. NO: 2 is a valine (as set forth in SEQ. ID. NO: 4), leucine or phenylalanine residue.

[0111] a. An A to G Transition at Nucleotide 2073 of the Human AKAP10 Coding Sequence

[0112] As described herein, an allelic variant of the human AKAP10 gene is at the polymorphic site at position 2073 of the coding sequence (see SEQ. ID. NO: 3) and encodes a valine at position 646 of the AKAP10 protein. This allelic variant has been found to vary in frequency in DNA samples from younger and older segments of a healthy population. This allele has the A at position 2073 of the AKAP10 gene coding sequence of SEQ. ID. NO: 1 changed to a G, giving rise to the sequence set forth in SEQ. ID. NO: 3. Consequently, the codon for amino acid 646 changes from ATT, coding for isoleucine, to GTT, coding for valine.

[0113] b. An A to C Transversion at Nucleotide 2073 of the Human AKAP10 Coding Sequence

[0114] In another human AKAP10 allelic variant, the nucleotide at position 2073 of the coding sequence in SEQ. ID. NO: 1 is changed from an A to a C. Thus, changing the codon for amino acid 646 from ATT, coding for isoleucine, to CTT, coding for leucine.

[0115] c. An A to T Transversion at Nucleotide 2073 of the Human AKAP10 Coding Sequence

[0116] In another human AKAP10 allelic variant, the nucleotide at position 2073 of the coding sequence in SEQ. ID. NO: 1 is changed from an A to a T. Thus, the codon for amino acid 646 changes from ATT, coding for isoleucine, to TTT, coding for phenylalanine.

[0117] d. Other AKAP10 Polymorphisms

TABLE 3

| Name | GenBank Accession No. | SNP | Location |
|---|---|---|---|
| 10-1 | AC005730 | T/C | 156277 |
| 10-7 | AC005730 | G/A | 129600 |

[0118] For AKAP10-1 additional variants are represented by the presence of A or G at nucleotide position 156277 of SEQ ID NO: 17.

[0119] For AKAP10-7 additional variants are represented by the presence of C or T at nucleotide position 129600 of SEQ ID NO: 17.

C. Association of AKAP10-5 I646V Variant with Cardiac Traits

[0120] The SNPs found to be associated with age were analyzed for association with disease-related quantitative traits in a twin collection. To identify traits correlated with the observed age association of the I646V SNP, a cohort of 417 fasting Caucasian twin pairs with extensive coverage for a variety of disease-related traits was utilized. The analysis was conducted using a quantitative transmission-disequilibrium test (QTDT) as described by Abecasis et al., (Am. J. Hum. Genet., 66:279-292, 2000) to take advantage of the twin-based sample and to control for admixture and other non-genetic sources of variation. Of the 97 traits analyzed, only the PR-interval from electrocardiogram (EKG or ECG) analysis was statistically significant at a nominal level of 0.05. The PR interval from EKG analysis is referred to herein is “EKG-PR-interval”. The estimate from the QTDT model of the average effect of the G allele (Val at position 646 of SEQ ID NO:2) was to decrease the PR interval 6.3 units (P=0.007). The genotype mean values in the subset of 207 informative twin pairs were 157±23.4, 152±26.9, and 146±25.4 (mean ± standard deviation) for genotypes AA, GA, and GG, respectively.

[0121] An analysis of covariance was also conducted to test the effect of the genotypes on PR mean levels. Age was included as a covariate in the model, which was significantly associated with PR mean up to a third order polynomial as set forth in FIG. 1. The relationship between age and PR mean was genotype-dependent, and therefore interaction terms between genotype and age were included. The predicted values from the resulting model are shown in FIG. 1 for each genotype. From about the age of 30 or just beyond and up to about the age of 70, it has been found that human subjects having the -GG- genotype, on average have a lower PRmean than human subjects having an -AA- homozygous genotype at a nucleotide corresponding to position 2073 of SEQ ID NO:1. From about the age of 40, it has also been found that human subjects having the -GG- genotype, on average have a lower PRmean than human subjects having either a -GA- heterozygous or -AA- homozygous genotype at a nucleotide corresponding to position 2073 of SEQ ID NO:1. Accordingly, on average a human subject about 30 years or older having a lower PRmean than an age-matched control group of -AA- homozygous at position 2073 of SEQ ID NO:1 has a higher likelihood of having either a -GA- heterozygous or a -GG- homozygous genotype at that position.

[0122] Thus, methods of comparing a subjects PR-interval to the PRmean of an age-matched control group of either one or both of an -AA- homozygous or -GA- heterozygous genotype at a nucleotide corresponding to position 2073 of SEQ ID NO:1 can identify subjects that have a higher likelihood of possessing a -GG- homozygous genotype at that position. Once a particular subject is identified as having a lower EKG-PR-interval than the PRmean from an age-matched control group, then that subject's particular genotype can be determined using the methods provided herein at a position corresponding to nucleotide 2073 of SEQ ID NO:1. As set forth herein, those subjects having the -GG- genotype have an increase susceptibility to a disease or disorder, such as a cardiovascular disease or disorder.

[0123] As also evident from FIG. 1, on average a human subject at any age having a lower PRmean than an age-matched control group of an -AA- homozygous at a nucleotide corresponding to position 2073 of SEQ ID NO:1 has a higher likelihood of having a -GA- heterozygous genotype than a -AA- homozygous genotype. Thus, for embodiments where it would be useful to identify subjects that can contain at least one “G” allele at a nucleotide corresponding to position 2073 of SEQ ID NO:1, methods of comparing a subjects PR-interval to the PRmean of an age-matched control group of an -AA- homozygous genotype at a nucleotide corresponding to position 2073 of SEQ ID NO:1 can identify subjects that have a higher likelihood of possessing at least one -G- allele at that position.

[0124] SNPs in the D-AKAP2 gene have been identified herein that are associated with morbidity using a genome-wide association study from an age-stratified healthy population and 6,500 gene-based SNPs. The combined genetic and biochemical evidence points to the Ile/Val variant as the functional polymorphism. The Val variant is contemplated to be the deleterious allele in a Caucasian-American cohort, and this finding is replicated in Hispanic-Americans. The variant maps to the conserved AKB domain of the D-AKAP2 gene. It has been found that the I646V variation impacts the binding to PKA in an isoform-specific manner both in vitro and in cells. The lie variant have been found to bind three-fold weaker to the RIa isoform than to the Val variant. At the cellular level, this affinity difference results in a dramatic decrease in compartmentalization of RIa for the Ile variant. The Ile/Val variant has been found to be critical for binding to only the RIa isoform of PKA.

[0125] Increasing evidence suggests that the RI and RII isoforms of PKA have distinct functions. The RI isoform has been implicated in a variety of biological functions such as cell proliferation, tumor suppression, immune regulation, and embryonic development. In addition, the RIa isoform plays a significant role in maintaining cAMP-regulation of PKA as evidenced by the embryonic lethality of mice deficient in the gene. Interestingly, these mice have defects in cardiac morphogenesis.

[0126] The identified correlation of the I646V variant (e.g., -G- at position 2073 of SEQ ID NO:1) with the EKG PR interval measurement is contemplated herein to indicate that the I646V polymorphism is a predisposing factor for a disease or disorder, such as a cardiovascular disease or disorder manifesting a cardiac phenotype. For example, individuals homozygous for the Val variant exhibit shorter depolarization intervals of the atrium (PR) as compared to individuals homozygous for Ile. This phenotypic correlation combined with reports in the literature supporting a role for AKAP mediated PKA signaling in normal cardiac function suggest a lead into the pathogenesis coded for by this functional variant. AKAP-mediated targeting of PKA in cardiac myocytes has been implicated in regulating cell contractility (Fink et al., Cir. Res., 88:291-297, 2001). Stimulation of the β-adrenergic signaling pathway in cardiac myocytes results in activation of PKA and phosphorylation of a variety of PKA substrates, including the sarcolemmal L-type Ca2+ channel, the ryanodine receptor (RyR), phospholamban (PLB) of the sarcoplasmic reticulum (SR), the myofibrillar proteins troponin I (TnI) and myosin binding protein C (MBP-C) (Holroyde et al., Biochim. Biophys. Acta, 586:63-69, 1979; Kranias et al., Nature, 298:182-184, 1982; Brum et al., Pflugers Arch., 401:111-118, 1984; Garvey et al., Biochem. J., 249:709-714, 1988; Marx et al., Cell, 101:365-376, 1999). Phosphorylation of these substrates acts in concert to generate both enhanced contractility and accelerated relaxation in response to β-adrenergic stimulation.

[0127] Although PKA has broad substrate specificity, it can be highly selective by targeting of PKA to distinct subcellular locations via interaction with AKAPs (Colledge et al., Trends Cell Biol., 19:216-221, 1999). Three AKAPs have been shown to interact with PKA in cardiac myocytes, muscle-selective AKAP (mAKAP), AKAP18 and Yotiao. mAKAP targets PKA to the perinuclear region of differentiated myocytes, coordinating both PKA and phosphodiesterase activity in a single complex (Kapiloff et al., J. Cell Sci., 114:3167-3176, 2001). AKAP18 couples PKA to L-type Ca2+ channels, which enhances Ca2+ influx through the channel following β-adrenergic stimulation (Gray et al., J. Biol. Chem., 272:6297-6302, 1997). Yotiao, previously associated with NMDA receptors, has been shown to interact with the KCNQ1-KCNE1 K+ channel subunits in human hearts (Marx et al., Science, 295:496-499, 2002). This channel is responsible for the slow delayed rectifier current that repolarizes the myocyte membrane and controls action potential duration. Mutations in this channel associated with hereditary long QT syndrome abolish Yotiao interactions with the channel, thereby attenuating PKA regulation (Marx et al., 2002). Additionally, in cardiac myocytes the RIα subunit is the predominant isoform associated with the sarcolemma (Robinson et al., Arch. Biochem. Biophys., 330:181-187, 1996; Reinitz et al., Arch. Biochem. Biophys., 348:391-402, 1997). Mutations in RI are associated with both familial cardiac myxomas and Carney complex, implicating this isoform in cardiac growth and differentiation (Casey et al., J. Clin. Invest., 106:R31-38, 2000; Kirschner et al., Nat. Genet., 26:89-92, 2000). Direct involvement of PKA in heart disease was also recently reported in a transgenic mice study (Antos et al., Circ. Res., 89:997-1004, 2001). The transgenic mice that overexpressed the catalytic subunit of PKA developed dilated cardiomyopathy with reduced cardiac contractility and increased risk of arrhythmias. These cardiac abnormalities correlated with PKA-mediated hyperphosphorylation of the ryanodine receptor and Ca2+ release from the sarcoplasmic reticulum (SR) and phospholamban, which regulates the activity of the SR Ca2+ -ATPase (Antos et al., 2001).

[0128] D-AKAP2 (AKAP10-5) contains a PDZ binding motif (TKL) at the C-terminus (FIG. 3a), which is contemplated herein to serve as a targeting domain to membrane-bound receptors or ion-channels (Harris et al., J. Cell Sci., 114:3219-3231, 2001), and two RGS domains, which are contemplated herein to coordinate upstream G alpha signaling with downstream PKA signaling. It is contemplated herein that D-AKAP2 is part of a signaling complex associated with a cardiac ion-channel. The D-AKAP2 variants is contemplated herein to impact the phosphorylation state of the ion-channel by recruiting different amounts of PKA-RIa and thereby modulate heart contraction. This model is in agreement with the observed association with an EKG phenotype. The shorter depolarization intervals for Val/Val homozygous individuals is contemplated herein to be due to increased activation of ion-channels in cardiac myocytes.

[0129] In summary, through the analysis of significant morbidity markers in a well-phenotyped healthy twin population, cardiac phenotypes have been associated to particular D-AKAP2 genotypes.

[0130] 1. Method for Indicating Increased Susceptibility of a Subject to a Disease or Disorder

[0131] Accordingly, provided herein are methods for indicating increased susceptibility of a subject to a disease or disorder, comprising:

[0132] conducting an EKG examination;

[0133] determining the EKG-PR-interval in the subject, wherein, if the EKG-PR-interval is decreased, then

[0134] determining the amino acid present in the subject at position 646 of AKAP10/D-AKAP2 (SEQ ID NO:2) or the nucleotide present at position corresponding to nucleotide 2073 of SEQ ID NO:1, wherein the presence of Val at position 646 of SEQ ID NO:2 or the presence of a -G- at nucleotide position 2073 of SEQ ID NO:1, indicates increased susceptibility to a disease or disorder. The disease or disorder can be selected from among cardiovascular disorders, cardiac disease, proliferative disorders, neurological disorders, neurodegenerative disorders, obesity, diabetes and peripheral retinopathies.

[0135] In one embodiment, the EKG-PR-interval in the subject is compared to a predetermined age-matched standard EKG-PR-interval. The predetermined standard EKG-PR-interval can be obtained from a known age-matched control group that is homozygous -AA- at a position corresponding to nucleotide 2073 of SEQ ID NO:1 or homozygous Ile/Ile at a position corresponding to position 646 of SEQ ID NO:2. The predetermined standard EKG-PR-interval can be obtained from a known age-matched control group that is heterozygous -GA- at a position corresponding to nucleotide 2073 of SEQ ID NO:1 or heterozygous Val/Ile at a position corresponding to position 646 of SEQ ID NO:2. The predetermined standard EKG-PR-interval can be obtained from a known age-matched control group that is selected from either homozygous -AA- at a position corresponding to nucleotide 2073 of SEQ ID NO:1 or homozygous Ile/Ile at a position corresponding to position 646 of SEQ ID NO:2; or heterozygous -GA- at a position corresponding to nucleotide 2073 of SEQ ID NO:1 or heterozygous Val/Ile at a position corresponding to position 646 of SEQ ID NO:2. In another embodiment, the predetermined standard EKG-PR-interval is obtained from a control age-matched subject without heart disease.

[0136] In one embodiment, the subject is heterozygous -GA- at a position corresponding to nucleotide 2073 of SEQ ID NO:1 or heterozygous Val/Ile at a position corresponding to position 646 of SEQ ID NO:2. In another embodiment, the subject is homozygous -GG- at a position corresponding to nucleotide 2073 of SEQ ID NO:1 or homozygous Val/Val at a position corresponding to position 646 of SEQ ID NO:2.

[0137] Also provided are methods for indicating increased susceptibility of a subject to a disease or disorder associated with the cardiovascular system, comprising:

[0138] conducting an EKG exam;

[0139] determining the EKG-PR-interval in the subject, wherein, if the EKG-PR-interval is decreased, then

[0140] determining the amino acid present at position 646 of AKAP10/D-AKAP2 (SEQ ID NO:2) or the nucleotide present at position corresponding to nucleotide 2073 of SEQ ID NO:1, wherein the presence of Val at position 646 of SEQ ID NO:2 or the presence of a -G- at nucleotide position 2073 of SEQ ID NO:1, indicates increased susceptibility to a disease or disorder associated with the cardiovascular system. The EKG-PR-interval in the subject can be compared to a predetermined age-matched standard EKG-PR-interval to determine whether it is decreased. The predetermined standard EKG-PR-interval can be obtained from a known age-matched control that is homozygous -AA- at a position corresponding to nucleotide 2073 of SEQ ID NO:1 or homozygous Ile/Ile at a position corresponding to position 646 of SEQ ID NO:2. The predetermined standard EKG-PR-interval can be obtained from a known age-matched control group that is heterozygous -GA- at a position corresponding to nucleotide 2073 of SEQ ID NO:1 or heterozygous Val/Ile at a position corresponding to position 646 of SEQ ID NO:2. The predetermined standard EKG-PR-interval can be obtained from a known age-matched control group that is selected from either homozygous -AA- at a position corresponding to nucleotide 2073 of SEQ ID NO:1 or homozygous Ile/Ile at a position corresponding to position 646 of SEQ ID NO:2; or heterozygous -GA- at a position corresponding to nucleotide 2073 of SEQ ID NO:1 or heterozygous Val/Ile at a position corresponding to position 646 of SEQ ID NO:2. In another embodiment, the predetermined standard EKG-PR-interval can be obtained from a control age-matched subject without heart disease.

[0141] In particular embodiments of the various methods provided herein, in the context of determining whether the EKG-PR-interval is decreased, a decreased EKG-PR-interval is less than 150 for a subject 40 or more year old. In another embodiment, a decreased EKG-PR-interval is less than 155 for a subject 50 or more year old. In another embodiment, a decreased EKG-PR-interval is less than 150 for a subject 50 or more year old. In another embodiment, a decreased EKG-PR-interval is less than 160 for a subject 60 or more year old. In another embodiment, a decreased EKG-PR-interval is less than 155 for a subject 60 or more year old. In another embodiment, a decreased EKG-PR-interval is less than 150 for a subject 60 or more year old.

[0142] In yet other embodiments, a decreased EKG-PR-interval for the subject is less than 146. In another embodiment, a decreased EKG-PR-interval for the subject is less than 130. In another embodiment, a decreased EKG-PR-interval for the subject is less than 120.

[0143] The disease or disorder can be selected from one or more of the group consisting of: atrial fibrillation, sick sinus syndrome, sudden cardiac arrest, ventricular arrythmia, ventricular fibrillation, ventricular tachycardia, Wolf-Parkinson-White (WPW) Syndrome, Lown-Ganong-Levin (LGL) Syndrome, hypertension. In one embodiment, the methods can further comprise monitoring the subject for cardiovascular disease.

[0144] In one embodiment, the subject is heterozygous -GA- at a position corresponding to nucleotide 2073 of SEQ ID NO:1 or heterozygous Val/Ile at a position corresponding to position 646 of SEQ ID NO:2. In another embodiment, the subject is homozygous -GG- at a position corresponding to nucleotide 2073 of SEQ ID NO:1 or homozygous Val/Val at a position corresponding to position 646 of SEQ ID NO:2.

[0145] In another embodiment, the methods can further comprise administering to the subject prophylactic steps. For example, in view of developments in genetics and technology as well as epidemiology, the methods provided herein permit the determination of the probability and risk assessment for the development of disease, in particular heart disease in an individual. Using the genetic screening methods herein and/or family health histories, it is possible to predict the probability a particular individual has for developing any one of several types of disease, such as heart disease. Those individuals identified as being predisposed to developing a particular form of disease by using the methods provided herein, can take prophylactic steps towards reducing the risk of the particular disease, such as a heart disease. Accordingly, high-risk individuals identified herein can take one or more of the well-known prophylactic steps against the form of disease that they have a predisposition to develop.

[0146] a. Methods of Assessing the Susceptibility of a Subject to a Disease or Disorder Associated with the Cardiovascular System

[0147] Also provided herein are methods of assessing the susceptibility of a subject to a disease or disorder associated with the cardiovascular system, the method comprising determining the amino acid at position 646 of AKAP10/D-AKAP2 (SEQ ID NO:2) or the nucleotide present at position corresponding to nucleotide 2073 of SEQ ID NO: 1, wherein the presence of Val at position 646 of SEQ ID NO:2 or the presence of a -G- at nucleotide position 2073 of SEQ ID NO:1, indicates increased susceptibility to a disease or disorder associated with the cardiovascular system.

[0148] Also provided herein are methods of diagnosing a disease or disorder associated with the cardiovascular system, comprising detecting the presence of Val at 646 of D-AKAP2 (SEQ ID NO:2) or the presence of a G at a nucleotide position corresponding to nucleotide 2073 of SEQ ID NO:1, wherein the presence of Val at position 646 of SEQ ID NO:2 or the presence of a -G- at nucleotide position 2073 of SEQ ID NO:1, indicates the presence of a disease or disorder associated with the cardiovascular system. In these methods, the disease or disorder can be from among one or more of the group consisting of: atrial fibrillation, sick sinus syndrome, sudden cardiac arrest, ventricular arrythmia, ventricular fibrillation, ventricular tachycardia, Wolf-Parkinson-White (WPW) Syndrome, Lown-Ganong-Levin (LGL) Syndrome, hypertension.

[0149] In one embodiment, the subject is heterozygous -GA- at a position corresponding to nucleotide 2073 of SEQ ID NO:1 or heterozygous Val/Ile at a position corresponding to position 646 of SEQ ID NO:2. In another embodiment, the subject is homozygous -GG- at a position corresponding to nucleotide 2073 of SEQ ID NO:1 or homozygous Val/Val at a position corresponding to position 646 of SEQ ID NO:2.

[0150] 2. Methods for Determining Responsiveness of a Subject to One or More β-Blocking Agents

[0151] The presence of the I646V variant in a subject is contemplated herein to affect the D-AKAP2-mediated β-adrenergic signaling pathway. For example, it is contemplated herein that the presence of 1 or 2 copies of the I646V variant (e.g., a -g- at nucleotide 2073 of SEQ ID NO:1) in a subject renders the subject resistant to treatment with, or the effects of, the well-known β-blockers. Beta-blockers (β-adrenergic blocking drugs) “block” the effects of adrenaline on the body's beta receptors. This slows the nerve impulses that travel through the heart. As a result, the heart does not have to work as hard because it needs less blood and oxygen. Beta-blockers also block the impulses that can cause an arrhythmia. In one embodiment, the heterozygous presence of the I646V variant (e.g., a -GA- heterozygous genotpye at a nucleotide corresponding to position 2073 of SEQ ID NO:1) is contemplated herein to produce a β-blocker resistance phenotype. In another embodiment, the homozygous presence of the I646V variant (e.g., a -GG- heterozygous genotpye at a nucleotide corresponding to position 2073 of SEQ ID NO:1) is contemplated herein to produce the β-blocker resistance phenotype.

[0152] Accordingly, provided herein are methods for determining responsiveness of a subject to one or more β-blocking agents, comprising:

[0153] detecting for the subject the presence or absence of Val at position 646 of SEQ ID NO:2 or a -G- nucleotide at a position corresponding to position 2073 of SEQ ID NO: 1, wherein the presence of a Val at position 646 of SEQ ID NO:2 or a -G- at nucleotide 2073 of SEQ ID NO: 1, is indicative of an increased likelihood that a subject has a modulated response to one or more β-blocking agents compared to a subject who does not have the allelic variant. In one embodiment, the modulated response is a decreased response to one or more β-blocking agents compared to a subject who does not have the allelic variant. In another embodiment, the decreased response is a non-response to one or more β-blocking agents compared to a subject who does not have the allelic variant. In yet another embodiment, the modulated response is an increased response to one or more β-blocking agents compared to a subject who does not have the allelic variant. The β-blocker ican bean antagonist of a β-adrenergic receptor. In another embodiment, the β-blocker is an agonist of a β-adrenergic receptor.

[0154] Also provided herein are methods for determining responsiveness of a subject to one or more β-blocking agents, comprising:

[0155] detecting the presence or absence of Val at position 646 of SEQ ID NO:2 or a -G- nucleotide at a position corresponding to position 2073 of SEQ ID NO: 1, wherein the presence of a Val at position 646 of SEQ ID NO:2 or a -G- at nucleotide 2073 of SEQ ID NO:1, is indicative of an increased likelihood that a subject has an increased response to one or more β-blocking agents compared to a subject who does not have the allelic variant. In one embodiment, the β-blocker is an antagonist of a β-adrenergic receptor. In another embodiment, the β-blocker is an agonist of a β-adrenergic receptor.

[0156] Also provided herein, are methods for determining responsiveness of a subject to one or more β-blocking agents, comprising:

[0157] detecting for the subject the presence or absence of Val at position 646 of SEQ ID NO:2 or a -G- nucleotide at a position corresponding to position 2073 of SEQ ID NO: 1, wherein the presence of a Val at position 646 of SEQ ID NO:2 or a -G- at nucleotide 2073 of SEQ ID NO:1, is indicative of an increased likelihood that a subject is non-responsive to one or more β-blocking agents compared to a subject who does not have the allelic variant. In one embodiment, the β-blocker is an antagonist of a β-adrenergic receptor. In another embodiment, the β-blocker is an agonist of a β-adrenergic receptor.

[0158] Also provided herein are methods for determining responsiveness of a subject to one or more β-blocking agents, comprising:

[0159] detecting the presence or absence of Val at position 646 of SEQ ID NO:2 or a -G- nucleotide at a position corresponding to position 2073 of SEQ ID NO: 1, wherein the presence of a Val at position 646 of SEQ ID NO:2 or a -G- at nucleotide 2073 of SEQ ID NO:1, is indicative of an increased likelihood that a subject is hyper-responsive to one or more β-blocking agents compared to a subject who does not have the allelic variant. The β-blocker can be an antagonist of a β-adrenergic receptor. In another embodiment, the β-blocker is an agonist of a β-adrenergic receptor.

[0160] Exemplary β-blockers well known in the art include, but are not limited to, Acebutolol, atenolol, Betaxolol, Bisoprolol, Carteolol, Carbedilol, Esmolol, Labetolol, Metoprolol, Nadolol, Penbutolol, Pindolol, Propranolol and Timolol. These β-blocking agents are used to treat: high blood pressure, angina, abnormal heart rythms, hypertrophic cardiomyopathy, heart failure, vasovagal fainting, migraines, essential tremor, bleeding from esophageal varices, stage fright, glaucoma and to prolong survival of heart attack patients. Thus, the methods provided herein are useful to identify subjects that require or would benefit from a different treatment regimen than the use of β-blockers for their respective disease or disorder.

[0161] In one embodiment, the subject is heterozygous -GA- at a position corresponding to nucleotide 2073 of SEQ ID NO:1 or heterozygous Val/Ile at a position corresponding to position 646 of SEQ ID NO:2. In another embodiment, the subject is homozygous -GG- at a position corresponding to nucleotide 2073 of SEQ ID NO:1 or homozygous Val/Val at a position corresponding to position 646 of SEQ ID NO:2.

[0162] 3. Method for Indicating Susceptibility of a Subject to Acquired Long Q-T Syndrome

[0163] The long QT syndrome (LQTS) is an abnormality of the heart's electrical system. The mechanical function of the heart is entirely normal. The electrical problem is due to defects in heart muscle cell structures called ion channels. These electrical defects predispose affected persons to a very fast heart rhythm (arrhythmia) called torsade de pointes which leads to sudden loss of consciousness (syncope) and can cause sudden cardiac death. The syndrome can be inherited (the genetic form) or acquired. The inherited long QT Syndrome was first clearly described in 1957. There are two variants, the autosomal dominant Romano-Ward type and the autosomal recessive Jervell and Lange Nielsen type. Even though LQTS was described almost 40 years ago, too many physicians are unaware of it. Whereas acquired long QT syndrome is most often due to the administration of medication. These medications are contraindicated in patients with the long QT syndrome.

[0164] There are a number of drugs which are known to prolong the QT-interval and to cause heart rhythm abnormalities, particularly in patients with the long QT syndrome (LQTS). Accordingly, patients with LQTS should always inquire their physician or other health care provider about the risk of any medication suggested or prescribed for them. In addition, LQTS-patients should always inform their doctor(s) and dentist(s) about their disease and make sure they know there are many medications which are contraindicated in this condition. For example, the department of pharmacology at Georgetown university provides a complete and up-to-date list of drugs that prolong the QT-interval (external link).

[0165] The frequency is unknown but long Q-T syndrome appears to be a common cause of sudden and unexplained death in children and young adults. It is certainly much more common than previously thought. It can be as frequent as 1 in 5,000, and can cause 3,000-4,000 sudden deaths in children and young adults each year in the United States. The Jervell and Lange Nielsen form is associated with congenital deafness and is rare, but the Romano-Ward variant, with normal hearing, is being recognized with increasing frequency.

[0166] The usual symptoms are syncope (sudden loss of consciousness) or sudden death, typically occurring during physical activity or emotional upset. These most commonly begin in preteen to teenage years, but can present from a few days of age to middle age. The syncopal episodes are often misdiagnosed as the common faint (vasovagal event) or a seizure. Actual seizures are uncommon in long QT syndrome, but epilepsy is one of the common errors in diagnosis. Sudden loss of consciousness during physical exertion or during emotional excitement should strongly raise the possibility of the long QT syndrome. A family history of unexplained syncope or sudden death in young people should also raise suspicion. Importantly, about one third of individuals who have the long QT syndrome never exhibit symptoms, and therefore, the lack of symptoms does not exclude a person or family from having LQTS. Any young person that has an unexplained cardiac arrest should be considered for LQTS, as well as those with unexplained syncope.

[0167] Since the electrocardiographic Q-T intervals vary in a given individual from day to day, and since Q-T prolongation in affected individuals can be mild, the diagnosis can be missed even if an EKG is performed. Therefore, because a patients can not receive an existing effective treatment in time because the condition which can kill quickly is sometimes very hard to diagnose, other methods of diagnosing long Q-T or a predisposition for long Q-T syndrome would be very useful. It is contemplated herein that the I646V variant in D-AKAP2 is indicative of a predisposition to the acquired form of Long Q-T syndrome. Accordingly, provided herein are methods that identify subjects who are predisposed or susceptible to acquired long Q-T syndrome. These methods are useful in identifying the class of subjects who should avoid taking particular medications, such as the well-documented group of medications that those diagnosed with long Q-T syndrome should avoid.

[0168] For example, provided herein are methods for indicating susceptibility of a subject to acquired long Q-T syndrome, comprising:

[0169] detecting the presence or absence of Val at position 646 of SEQ ID NO:2 or presence or absence of a -G- nucleotide at a position corresponding to position 2073 of SEQ ID NO: 1, wherein the presence of a Val at position 646 of SEQ ID NO:2 or a -G- at nucleotide 2073 of SEQ ID NO:1, is indicative of increased susceptibility to acquired long Q-T syndrome, compared to the susceptibility of a subject who does not have the allelic variant. The detecting step can be effected by a method selected from the group consisting of allele specific hybridization, primer specific extension, oligonucleotide ligation assay, restriction enzyme site analysis and single-stranded conformation polymorphism analysis. In addition, the detecting step can comprise mass spectrometry. The detection can be effected by detecting a signal moiety selected from the group consisting of radioisotopes, enzymes, antigens, antibodies, spectrophotometric reagents, chemiluminescent reagents, fluorescent reagents and other light producing reagents.

[0170] In one embodiment, the subject is heterozygous -GA- at a position corresponding to nucleotide 2073 of SEQ ID NO:1 or heterozygous Val/Ile at a position corresponding to position 646 of SEQ ID NO:2. In another embodiment, the subject is homozygous -GG- at a position corresponding to nucleotide 2073 of SEQ ID NO:1 or homozygous Val/Val at a position corresponding to position 646 of SEQ ID NO:2.

[0171] 4. Methods for Indicating Susceptibility to Morbidity, Increased or Early Mortality, or Morbidity and Increased or Early Mortality of a Subject

[0172] Also provided herein, are methods for indicating susceptibility to morbidity, increased or early mortality, or morbidity and increased or early mortality of a subject; comprising:

[0173] conducting an EKG exam;

[0174] determining the EKG-PR-interval in the subject, wherein if the EKG-PR-interval is decreased; then

[0175] determining the amino acid at position 646 of AKAP10/D-AKAP2 (SEQ ID NO:2) or the nucleotide present at position corresponding to nucleotide 2073 of SEQ ID NO:1, wherein the presence of Val at position 646 of SEQ ID NO:2 or the presence of a -G- at nucleotide position 2073 of SEQ ID NO: 1, indicates increased susceptibility to morbidity, increased or early mortality, or morbidity and increased or early mortality of a subject. The EKG-PR-interval in the subject can be compared to a predetermined standard EKG-PR-interval. The predetermined standard EKG-PR-interval can be obtained from a known age-matched control that is homozygous -AA- at a position corresponding to nucleotide 2073 of SEQ ID NO:1 or homozygous Ile/Ile at a position corresponding to position 646 of SEQ ID NO:2. The detecting step can be effected by a method selected from the group consisting of allele specific hybridization, primer specific extension, oligonucleotide ligation assay, restriction enzyme site analysis and single-stranded conformation polymorphism analysis. The detecting step can comprise mass spectrometry. The detection step can be effected by detecting a signal moiety selected from the group consisting of radioisotopes, enzymes, antigens, antibodies, spectrophotometric reagents, chemiluminescent reagents, fluorescent reagents and other light producing reagents.

[0176] In one embodiment, the subject is heterozygous -GA- at a position corresponding to nucleotide 2073 of SEQ ID NO:1 or heterozygous Val/Ile at a position corresponding to position 646 of SEQ ID NO:2. In another embodiment, the subject is homozygous -GG- at a position corresponding to nucleotide 2073 of SEQ ID NO:1 or homozygous Val/Val at a position corresponding to position 646 of SEQ ID NO:2.

D. Detection of Polymorphisms in Human AKAP10 Genes

[0177] Methods of determining the presence or absence of allelic variants of a human AKAP10 gene are also provided. In particular methods, the detection or identification of a G, C, or T nucleotide at position 2073 of the sense strand of the human AKAP10 gene coding sequence (see SEQ ID NO: 1), or the detection or identification of a C, G or A nucleotide at the same position in the antisense strand of the human AKAP10 gene coding sequence, indicates the presence of an allelic variant. In these particular methods, the detection or identification of an A nucleotide at position 2073 of the sense strand of the human AKAP10 gene coding sequence, or the detection or identification of a T nucleotide at the same position in the antisense strand of the human AKAP10 gene coding sequence, indicates the absence of polymorphism.

[0178] Other methods for determining the presence or absence of an allelic variant of the AKAP10 gene detect or identify a nucleotide other than a C at position 83587 of the SEQ ID NO: 17 or a nucleotide other than a G on the complementary strand, a nucleotide other than a G at position 129600 of the SEQ ID NO: 17 or a nucleotide other than a C on the complementary strand or a nucleotide other than T at position 156,277 of SEQ ID NO: 17 or a nucleotide other than A on the complementary strand.

[0179] 1. Nucleic Acid Detection Methods

[0180] Generally, these methods are based in sequence-specific polynucleotides, oligonucleotides, probes and primers. Any method known to those of skill in the art for detecting a specific nucleotide within a nucleic acid sequence or for determining the identity of a specific nucleotide in a nucleic acid sequence is applicable to the methods of determining the presence or absence of an allelic variant of the AKAP10 gene. Such methods include, but are not limited to, techniques utilizing nucleic acid hybridization of sequence-specific probes, nucleic acid sequencing, selective amplification, analysis of restriction enzyme digests of the nucleic acid, cleavage of mismatched heteroduplexes of nucleic acid and probe, alterations of electrophoretic mobility, primer specific extension, oligonucleotide ligation assay and single-stranded conformation polymorphism analysis. In particular, primer extension reactions that specifically terminate by incorporating a dideoxynucleotide are useful for detection. Several such general nucleic acid detection assays are known (see, e.g., U.S. Pat. No. 6,030,778).

[0181] a. Primer Extension-Based Methods

[0182] Several primer extension-based methods for determining the identity of a particular nucleotide in a nucleic acid sequence have been reported (see, e.g., PCT Application Nos. PCT/US96/03651 (WO96/29431), PCT/US97/20444 (WO 98/20166), PCT/US97/20194 (WO 98/20019), PCT/US91/00046 (WO91/13075), and U.S. Pat. Nos. 5,547,835, 5,605,798, 5,622,824, 5,691,141, 5,872,003, 5,851,765, 5,856,092, 5,900,481, 6,043,031, 6,133,436 and 6,197,498.) In general, a primer is prepared that specifically hybridizes adjacent to a polymorphic site in a particular nucleic acid molecule. The primer is then extended in the presence of one or more dideoxynucleotides, typically with at least one of the dideoxynucleotides being the complement of the nucleotide that is polymorphic at the site. The primer and/or the dideoxynucleotides can be labeled to facilitate a determination of primer extension and identity of the extended nucleotide.

[0183] In an exemplary method, primer extension and/or the identity of the extended nucleotide(s) are determined by mass spectrometry (see, e.g., PCT Application Nos. PCT/US96/03651 (WO96/29431), PCT Application No. PCT/US97/20444 (WO 98/20166), PCT Application No. PCT/US97/20194 (WO 98/20019), PCT Application No. PCT/US91/00046 (WO91/13075), and U.S. Pat. Nos. 5,605,798, 5,622,824, 5,856,092.

[0184] b. Polymorphism-Specific Probe Hybridization

[0185] A typical detection method is allele specific hybridization using probes overlapping the polymorphic site and having about 5, 10, 15, 20, 25, or 30 nucleotides around the polymorphic region. The probes can contain naturally occurring or modified nucleotides (see U.S. Pat. No. 6,156,501). For example, oligonucleotide probes can be prepared in which the known polymorphic nucleotide is placed centrally (allele-specific probes) and then hybridized to target DNA under conditions which permit hybridization only if a perfect match is found (Saiki et al. (1986) Nature 324:163; Saiki et al. (1989) Proc. Natl. Acad. Sci USA 86:6230; and Wallace et al. (1979) Nucl. Acids Res. 6:3543). Such allele specific oligonucleotide hybridization techniques can be used for the simultaneous detection of several nucleotide changes in different polymorphic regions. For example, oligonucleotides having nucleotide sequences of specific allelic variants are attached to a hybridizing membrane and this membrane is then hybridized with labeled sample nucleic acid. Analysis of the hybridization signal will then reveal the identity of the nucleotides of the sample nucleic acid. In one embodiment, several probes capable of hybridizing specifically to allelic variants are attached to a solid phase support, e.g., a “chip”. Oligonucleotides can be bound to a solid support by a variety of processes, including lithography. For example a chip can hold up to 250,000 oligonucleotides (GeneChip, Affymetrix, Santa Clara, Calif.). Mutation detection analysis using these chips comprising oligonucleotides, also termed “DNA probe arrays” is described e.g., in Cronin et al. (1996) Human Mutation 7:244 and in Kozal et al. (1996) Nature Medicine 2:753. In one embodiment, a chip includes all the allelic variants of at least one polymorphic region of a gene. The solid phase support is then contacted with a test nucleic acid and hybridization to the specific probes is detected. Accordingly, the identity of numerous allelic variants of one or more genes can be identified in a simple hybridization experiment.

[0186] c. Nucleic Acid Amplification-Based Methods

[0187] In other detection methods, it is necessary to first amplify at least a portion of an AKAP gene prior to identifying the allelic variant. Amplification can be performed, e.g., by PCR and/or LCR, according to methods known in the art. In one embodiment, genomic DNA of a cell is exposed to two PCR primers and amplification is performed for a number of cycles sufficient to produce the required amount of amplified DNA. In typical embodiments, the primers are located between 150 and 350 base pairs apart.

[0188] Alternative amplification methods include: self sustained sequence replication (Guatelli, J. C. et al., 1990, Proc. Natl. Acad. Sci. U.S.A. 87:1874-1878), transcriptional amplification system (Kwoh, D. Y. et al., 1989, Proc. Natl. Acad. Sci. U.S.A. 86:1173-1177), Q-Beta Replicase Lizardi, P. M. et al., 1988, Bio/Technology 6:1197), or any other nucleic acid amplification method, followed by the detection of the amplified molecules using techniques well known to those of skill in the art. These detection schemes are especially useful for the detection of nucleic acid molecules if such molecules are present in very low numbers.

[0189] Alternatively, allele specific amplification technology, which depends on selective PCR amplification can be used in conjunction with the alleles provided herein. Oligonucleotides used as primers for specific amplification can carry the allelic variant of interest in the center of the molecule (so that amplification depends on differential hybridization) (Gibbs et al. (1989) Nucleic Acids Res. 17:2437-2448) or at the extreme 3′ end of one primer where, under appropriate conditions, mismatch can prevent, or reduce polymerase extension (Prossner (1 993) Tibtech 11:238; Newton et al. (1989) Nucl. Acids Res. 17:2503). In addition it can be desirable to introduce a restriction site in the region of the mutation to create cleavage-based detection (Gasparini et al. (1992) Mol. Cell Probes 6:1).

[0190] d. Nucleic Acid Sequencing-Based Methods

[0191] In one embodiment, any of a variety of sequencing reactions known in the art can be used to directly sequence at least a portion of an AKAP gene and to detect allelic variants, e.g., mutations, by comparing the sequence of the sample sequence with the corresponding wild-type (control) sequence. Exemplary sequencing reactions include those based on techniques developed by Maxam and Gilbert (Proc. Natl. Acad. Sci. USA (1977) 74:560) or Sanger (Sanger et al. (1977) Proc. Natl. Acad. Sci 74:5463). It is also contemplated that any of a variety of automated sequencing procedures can be used when performing the subject assays (Biotechniques (1995) 19:448), including sequencing by mass spectrometry (see, for example, U.S. Pat. Nos. 5,547,835, 5,691,141, and International PCT Application No. PCT/US94/00193 (WO 94/16101), entitled “DNA Sequencing by Mass Spectrometry” by H. Koster; U.S. Pat. Nos. 5,547,835, 5,622,824, 5,851,765, 5,872,003, 6,074,823, 6,140,053 and International PCT Application No. PCT/US94/02938 (WO 94/21822), entitled “DNA Sequencing by Mass Spectrometry Via Exonuclease Degradation” by H. Koster), and U.S. Pat. Nos. 5,605,798, 6,043,031, 6,197,498, and International Patent Application No. PCT/US96/03651 (WO 96/29431) entitled “DNA Diagnostics Based on Mass Spectrometry” by H. Koster; Cohen et al. (1996) Adv Chromatography 36:127-162; and Griffin et al. (1993) Appl. Biochem Biotechnol 38:147-159). It will be evident to one skilled in the art that, for certain embodiments, the occurrence of only one, two or three of the nucleic acid bases need be determined in the sequencing reaction. For instance, A-track sequencing or an equivalent, e.g., where only one nucleotide is detected, can be carried out. Other sequencing methods are known (see, e.g., in U.S. Pat. No. 5,580,732 entitled “Method of DNA sequencing employing a mixed DNA-polymer chain probe” and U.S. Pat. No. 5,571,676 entitled “Method for mismatch-directed in vitro DNA sequencing”).

[0192] e. Restriction Enzyme Digest Analysis

[0193] In some cases, the presence of a specific allele in nucleic acid, particularly DNA, from a subject can be shown by restriction enzyme analysis. For example, a specific nucleotide polymorphism can result in a nucleotide sequence containing a restriction site which is absent from the nucleotide sequence of another allelic variant.

[0194] f. Mismatch Cleavage

[0195] Protection from cleavage agents, such as, but not limited to, a nuclease, hydroxylamine or osmium tetroxide and with piperidine, can be used to detect mismatched bases in RNA/RNA DNA/DNA, or RNA/DNA heteroduplexes (Myers, et al. (1985) Science 230:1242). In general, the technique of “mismatch cleavage” starts by providing heteroduplexes formed by hybridizing a control nucleic acid, which is optionally labeled, e.g., RNA or DNA, comprising a nucleotide sequence of an allelic variant with a sample nucleic acid, e.g, RNA or DNA, obtained from a tissue sample. The double-stranded duplexes are treated with an agent, which cleaves single-stranded regions of the duplex such as duplexes formed based on basepair mismatches between the control and sample strands. For instance, RNA/DNA duplexes can be treated with RNase and DNA/DNA hybrids treated with SI nuclease to enzymatically digest the mismatched regions.

[0196] In other embodiments, either DNA/DNA or RNA/DNA duplexes can be treated with hydroxylamine or osmium tetroxide and with piperidine in order to digest mismatched regions. After digestion of the mismatched regions, the resulting material is then separated by size on denaturing polyacrylamide gels to determine whether the control and sample nucleic acids have an identical nucleotide sequence or in which nucleotides they differ (see, for example, Cotton et al. (1988) Proc. Natl. Acad Sci USA 85:4397; Saleeba et al. (1992) Methods Enzymod. 217:286-295). The control or sample nucleic acid is labeled for detection.

[0197] g. Electrophoretic Mobility Alterations

[0198] In other embodiments, alteration in electrophoretic mobility is used to identify the type of allelic variant in an AKAP gene. For example, single-strand conformation polymorphism (SSCP) can be used to detect differences in electrophoretic mobility between mutant and wild type nucleic acids (Orita et al. (1989) Proc. Natl. Acad. Sci. USA 86:2766, see also Cotton (1993) Mutat Res 285:125-144; and Hayashi (1992) Genet Anal Tech Appl 9:73-79). Single-stranded DNA fragments of sample and control nucleic acids are denatured and allowed to renature. The secondary structure of single-stranded nucleic acids varies according to sequence, the resulting alteration in electrophoretic mobility enables the detection of even a single base change. The DNA fragments can be labeled or detected with labeled probes. The sensitivity of the assay can be enhanced by using RNA (rather than DNA), in which the secondary structure is more sensitive to a change in sequence. In another embodiment, the subject method uses heteroduplex analysis to separate double stranded heteroduplex molecules on the basis of changes in electrophoretic mobility (Keen et al. (1991) Trends Genet 7:5).

[0199] h. Polyacrylamide Gel Electrophoresis

[0200] In yet another embodiment, the identity of an allelic variant of a polymorphic region of an AKAP gene is obtained by analyzing the movement of a nucleic acid comprising the polymorphic region in polyacrylamide gels containing a gradient of denaturant is assayed using denaturing gradient gel electrophoresis (DGGE) (Myers et al. (1985) Nature 313:495). When DGGE is used as the method of analysis, DNA will be modified to ensure that it does not completely denature, for example by adding a GC clamp of approximately 40 bp of high-melting GC-rich DNA by PCR. In a further embodiment, a temperature gradient is used in place of a denaturing agent gradient to identify differences in the mobility of control and sample DNA (Rosenbaum and Reissner (1987) Biophys Chem 265:1275).

[0201] i. Oligonucleotide Ligation Assay (OLA)

[0202] In another embodiment, identification of the allelic variant is carried out using an oligonucleotide ligation assay (OLA), as described, e.g., in U.S. Pat. No. 4,998,617 and in Landegren, U. et al., Science 241:1077-1080 (1988). The OLA protocol uses two oligonucleotides which are designed to be capable of hybridizing to abutting sequences of a single strand of a target. One of the oligonucleotides is linked to a separation marker, e.g., biotinylated, and the other is detectably labeled. If the precise complementary sequence is found in a target molecule, the oligonucleotides will hybridize such that their termini abut, and create a ligation substrate. Ligation then permits the labeled oligonucleotide to be recovered using avidin, or another biotin ligand. Nickerson, D. A. et al. have described a nucleic acid detection assay that combines attributes of PCR and OLA (Nickerson, D. A. et al., Proc. Natl. Acad. Sci. (U.S.A.) 87:8923-8927 (1990). In this method, PCR is used to achieve the exponential amplification of target DNA, which is then detected using OLA.

[0203] Several techniques based on this OLA method have been developed and can be used to detect specific allelic variants of a polymorphic region of a gene. For example, U.S. Pat. No. 5,593,826 discloses an OLA using an oligonucleotide having 3′-amino group and a 5′-phosphorylated oligonucleotide to form a conjugate having a phosphoramidate linkage. In another variation of OLA described in Tobe et al. (1996) Nucl. Acids Res. 24: 3728), OLA combined with PCR permits typing of two alleles in a single microtiter well. By marking each of the allele-specific primers with a unique hapten, i.e. digoxigenin and fluorescein, each OLA reaction can be detected by using hapten specific antibodies that are labeled with different enzyme reporters, alkaline phosphatase or horseradish peroxidase. This system permits the detection of the two alleles using a high throughput format that leads to the production of two different colors.

[0204] j. SNP Detection Methods

[0205] Also provided are methods for detecting single nucleotide polymorphisms. Because single nucleotide polymorphisms constitute sites of variation flanked by regions of invariant sequence, their analysis requires no more than the determination of the identity of the single nucleotide present at the site of variation and it is unnecessary to determine a complete gene sequence for each patient. Several methods have been developed to facilitate the analysis of such single nucleotide polymorphisms.

[0206] In one embodiment, the single base polymorphism can be detected by using a specialized exonuclease-resistant nucleotide, as disclosed, e.g., in Mundy, C. R. (U.S. Pat. No. 4,656,127). According to the method, a primer complementary to the allelic sequence immediately 3′ to the polymorphic site is permitted to hybridize to a target molecule obtained from a particular animal or human. If the polymorphic site on the target molecule contains a nucleotide that is complementary to the particular exonuclease-resistant nucleotide derivative present, then that derivative will be incorporated onto the end of the hybridized primer. Such incorporation renders the primer resistant to exonuclease, and thereby permits its detection. Since the identity of the exonuclease-resistant derivative of the sample is known, a finding that the primer has become resistant to exonucleases reveals that the nucleotide present in the polymorphic site of the target molecule was complementary to that of the nucleotide derivative used in the reaction. This method has the advantage that it does not require the determination of large amounts of extraneous sequence data.

[0207] In another embodiment, a solution-based method for determining the identity of the nucleotide of a polymorphic site is employed (Cohen, D. et al. (French Patent 2,650,840; PCT Application No. WO91/02087)). As in the Mundy method of U.S. Pat. No. 4,656,127, a primer is employed that is complementary to allelic sequences immediately 3′ to a polymorphic site. The method determines the identity of the nucleotide of that site using labeled dideoxynucleotide derivatives, which, if complementary to the nucleotide of the polymorphic site will become incorporated onto the terminus of the primer.

[0208] k. Genetic Bit Analysis

[0209] An alternative method, known as Genetic Bit Analysis or GBA™ is described by Goelet, et al. (U.S. Pat. No. 6,004,744, PCT Application No. 92/15712). The method of Goelet, et al. uses mixtures of labeled terminators and a primer that is complementary to the sequence 3′ to a polymorphic site. The labeled terminator that is incorporated is thus determined by, and complementary to, the nucleotide present in the polymorphic site of the target molecule being evaluated. In contrast to the method of Cohen et al. (French Patent 2,650,840; PCT Application No. WO91/02087), the method of Goelet, et al. is typically a heterogeneous phase assay, in which the primer or the target molecule is immobilized to a solid phase.

[0210] l. Other Primer-Guided Nucleotide Incorporation Procedures

[0211] Other primer-guided nucleotide incorporation procedures for assaying polymorphic sites in DNA have been described (Komher, J. S. et al., Nucl. Acids Res. 17:7779-7784 (1989); Sokolov, B. P., Nucl. Acids Res. 18:3671 (1990); Syvanen, A. C., et al., Genomics 8:684-692 (1990), Kuppuswamy, M. N. et al., Proc. Natl. Acad. Sci. (U.S.A.) 88:1143-1147 (1991); Prezant, T. R. et al., Hum. Mutat. 1:159-164 (1992); Ugozzoli, L. et al., GATA 9:107-112 (1992); Nyren, P. et al., Anal. Biochem. 208:171-175 (1993)). These methods differ from GBA™ in that they all rely on the incorporation of labeled deoxynucleotides to discriminate between bases at a polymorphic site. In such a format, since the signal is proportional to the number of deoxynucleotides incorporated, polymorphisms that occur in runs of the same nucleotide can result in signals that are proportional to the length of the run (Syvanen, A. C., et al., Amer. J. Hum. Genet. 52:46-59 (1993)).

[0212] For determining the identity of the allelic variant of a polymorphic region located in the coding region of a gene, yet other methods than those described above can be used. For example, identification of an allelic variant which encodes a mutated protein can be performed by using an antibody specifically recognizing the mutant protein in, e.g., immunohistochemistry or immunoprecipitation. Binding assays are known in the art and involve, e.g., obtaining cells from a subject, and performing binding experiments with a labeled lipid, to determine whether binding to the mutated form of the protein differs from binding to the wild-type protein.

[0213] m. Molecular Structure Determination

[0214] If a polymorphic region is located in an exon, either in a coding or non-coding region of the gene, the identity of the allelic variant can be determined by determining the molecular structure of the mRNA, pre-mRNA, or cDNA. The molecular structure can be determined using any of the above described methods for determining the molecular structure of the genomic DNA, e.g., sequencing and SSCP.

[0215] n. Mass Spectrometric Methods

[0216] Nucleic acids can also be analyzed by detection methods and protocols, particularly those that rely on mass spectrometry (see, e.g., U.S. Pat. Nos. 5,605,798, 6,043,031, 6,197,498, and International Patent Application No. WO 96/29431, allowed co-pending U.S. application Ser. No. 08/617,256, allowed co-pending U.S. application Ser. No. 08/744,481, U.S. application Ser. No. 08/990,851, International PCT Application No. WO 98/20019). These methods can be automated (see, e.g., co-pending U.S. application Ser. No. 09/285,481, which describes an automated process line). Among the methods of analysis herein are those involving the primer oligo base extension (PROBE) reaction with mass spectrometry for detection (see e.g., U.S. Pat. Nos. 6,043,031 and 6,197,498, patent application Ser. Nos. 09/287,681, 09/287,682, and 09/287,679, allowed co-pending U.S. application Ser. No. 08/744,481, International PCT Application No. PCT/US97/20444 (WO 98/20166), and based upon U.S. Pat. Nos. 5,900,481, 6,024,925, 6,074,823, application Ser. Nos. 08/746,055, 08/786,988, 08/933,792, 08/746,055, and 08/786,988; see, also U.S. application Ser. No. 09/074,936, and published International PCT Application No. PCT/US97/20195 (WO 98/20020)).

[0217] A typical format for performing the analyses is a chip based format in which the biopolymer is linked to a solid support, such as a silicon or silicon-coated substrate, for example, in the form of an array. More typically, when analyses are performed using mass spectrometry, particularly MALDI, nanoliter volumes of sample are loaded on, such that the resulting spot is about, or smaller than, the size of the laser spot. It has been found that when this is achieved, the results from the mass spectrometric analysis are quantitative. The area under the peaks in the resulting mass spectra are proportional to concentration (when normalized and corrected for background). Methods for preparing and using such chips are described in U.S. Pat. No. 6,024,925, co-pending U.S. application Ser. Nos. 08/786,988, 09/364,774, 09/371,150 and 09/297,575; see, also PCT Application No. PCT/US97/20195 (WO 98/20020). Chips and kits for performing these analyses are commercially available from SEQUENOM under the trademark MassARRAY™. MassARRAY™ relies on the fidelity of the enzymatic primer extension reactions combined with the miniaturized array and MALDI-TOF (Matrix-Assisted Laser Desorption Ionization-Time of Flight) mass spectrometry to deliver results rapidly. It accurately distinguishes single base changes in the size of DNA fragments relating to genetic variants without tags.

[0218] Multiplex methods allow for the simultaneous detection of more than one polymorphic region in a particular gene. This is the typical method for carrying out haplotype analysis of allelic variants of the AKAP10 gene.

[0219] Multiplexing can be achieved by several different methodologies. For example, several mutations can be simultaneously detected on one target sequence by employing corresponding detector (probe) molecules (e.g., oligonucleotides or oligonucleotide mimetics). The molecular weight differences between the detector oligonucleotides must be large enough so that simultaneous detection (multiplexing) is possible. This can be achieved either by the sequence itself (composition or length) or by the introduction of mass-modifying functionalities into the detector oligonucleotides (see below).

[0220] Mass modifying moieties can be attached, for instance, to either the 5′-end of the oligonucleotide, to the nucleobase (or bases), to the phosphate backbone, and to the 2′-position of the nucleoside (nucleosides) and/or to the terminal 3′-position. Examples of mass modifying moieties include, for example, a halogen, an azido, or of the type, XR, wherein X is a linking group and R is a mass-modifying functionality. The mass-modifying functionality can thus be used to introduce defined mass increments into the oligonucleotide molecule.

[0221] The mass-modifying functionality can be located at different positions within the nucleotide moiety (see, e.g., U.S. Pat. No. 5,547,835 and International PCT Application No. WO 94/21822). For example, the mass-modifying moiety, M, can be attached either to the nucleobase, (in case of the c⁷-deazanucleosides also to C-7), to the triphosphate group at the alpha phosphate or to the 2′-position of the sugar ring of the nucleoside triphosphate. Modifications introduced at the phosphodiester bond, such as with alpha-thio nucleoside triphosphates, have the advantage that these modifications do not interfere with accurate Watson-Crick base-pairing and additionally allow for the one-step post-synthetic site-specific modification of the complete nucleic acid molecule e.g., via alkylation reactions (see, e.g., Nakamaye et al. (1988) Nucl. Acids Res. 16:9947-59). Typical mass-modifying functionalities are boron-modified nucleic acids since they are better incorporated into nucleic acids by polymerases (see, e.g., Porter et al. (1995) Biochemistry 34:11963-11969; Hasan et al. (1996) Nucleic Acids Res. 24:2150-2157; Li et al. (1995) Nucl. Acids Res. 23:4495-4501).

[0222] Furthermore, the mass-modifying functionality can be added so as to affect chain termination, such as by attaching it to the 3′-position of the sugar ring in the nucleoside triphosphate. For those skilled in the art, it is clear that many combinations can be used in the methods provided herein. In the same way, those skilled in the art will recognize that chain-elongating nucleoside triphosphates can also be mass-modified in a similar fashion with numerous variations and combinations in functionality and attachment positions.

[0223] For example, without being bound to any particular theory, the mass-modification can be introduced for X in XR as well as using oligo-/polyethylene glycol derivatives for R. The mass-modifying increment (m) in this case is 44, i.e. five different mass-modified species can be generated by just changing m from 0 to 4 thus adding mass units of 45 (m=0), 89 (m=1), 133 (m=2), 177 (m=3) and 221 (m=4) to the nucleic acid molecule (e.g., detector oligonucleotide (D) or the nucleoside triphosphates, respectively). The oligo/polyethylene glycols can also be monoalkylated by a lower alkyl such as, but are not limited to, methyl, ethyl, propyl, isopropyl and t-butyl. Other chemistries can be used in the mass-modified compounds (see, e.g., those described in Oligonucleotides and Analogues, A Practical Approach, F. Eckstein, editor, IRL Press, Oxford, 1991).

[0224] In yet another embodiment, various mass-modifying functionalities, R, other than oligo/polyethylene glycols, can be selected and attached via appropriate linking chemistries, X. A simple mass-modification can be achieved by substituting H for halogens, such as F, Cl, Br and/or I, or pseudohalogens such as CN, SCN, NCS, or by using different alkyl, aryl or aralkyl moieties such as methyl, ethyl, propyl, isopropyl, t-butyl, hexyl, phenyl, substituted phenyl, benzyl, or functional groups such as CH₂F, CHF₂, CF₃, Si(CH₃)₃, Si(CH₃)₂(C₂H₅), Si(CH₃)(C₂H₅)₂, Si(C₂H₅)₃. Yet another mass-modification can be obtained by attaching homo- or heteropeptides through the nucleic acid molecule (e.g., detector (D)) or nucleoside triphosphates). One example, useful in generating mass-modified species with a mass increment of 57, is the attachment of oligoglycines (m) to nucleic acid molecules (r), e,g., mass-modifications of 74 (r=1, m=0), 131 (r=1, m=1), 188 (r=1, m=2), 245 (r=1, m=3) are achieved. Simple oligoamides also can be used, e.g., mass-modifications of 74 (r=1, m=0), 88 (r=2, m=0), 102 (r=3, m=0), 116(r=4, m=0), etc. are obtainable. Variations in additions to those set forth herein will be apparent to the skilled artisan.

[0225] Different mass-modified detector oligonucleotides can be used to simultaneously detect all possible variants/mutants simultaneously. Alternatively, all four base permutations at the site of a mutation can be detected by designing and positioning a detector oligonucleotide, so that it serves as a primer for a DNA/RNA polymerase with varying combinations of elongating and terminating nucleoside triphosphates. For example, mass modifications also can be incorporated during the amplification process.

[0226] A different multiplex detection format is one in which differentiation is accomplished by employing different specific capture sequences which are position-specifically immobilized on a flat surface (e.g., a ‘chip array’). If different target sequences T1-Tn are present, their target capture sites TCS1-TCSn will specifically interact with complementary immobilized capture sequences C1-Cn. Detection is achieved by employing appropriately mass differentiated detector oligonucleotides D1-Dn, which are mass modifying functionalities M1-Mn.

[0227] o. Other Methods

[0228] Additional methods of analyzing nucleic acids include amplification- based methods including polymerase chain reaction (PCR), ligase chain reaction (LCR), mini-PCR, rolling circle amplification, autocatalytic methods, such as those using QJ replicase, TAS, 3SR, and any other suitable method known to those of skill in the art.

[0229] Other methods for analysis and identification and detection of polymorphisms, include but are not limited to, allele specific probes, Southern analyses, and other such analyses.

[0230] 2. Primers, Probes and Antisense Nucleic Acid Molecules

[0231] Primers refer to nucleic acids which are capable of specifically hybridizing to a nucleic acid sequence which is adjacent to a polymorphic region of interest or to a polymorphic region and are extended. A primer can be used alone in a detection method, or a primer can be used together with at least one other primer or probe in a detection method. Primers can also be used to amplify at least a portion of a nucleic acid. For amplifying at least a portion of a nucleic acid, a forward primer (i.e., 5′ primer) and a reverse primer (i.e., 3′ primer) will typically be used. Forward and reverse primers hybridize to complementary stands of a double stranded nucleic acid, such that upon extension from each primer, a double stranded nucleic acid is amplified.

[0232] Probes refer to nucleic acids which hybridize to the region of interest and which are not further extended. For example, a probe is a nucleic acid which hybridizes adjacent to or at a polymorphic region of an AKAP gene and which by hybridization or absence of hybridization to the DNA of a subject will be indicative of the identity of the allelic variant of the polymorphic region of the gene. Typical probes have a number of nucleotides sufficient to allow specific hybridization to the target nucleotide sequence. Where the target nucleotide sequence is present in a large fragment of DNA, such as a genomic DNA fragment of several tens or hundreds of kilobases, the size of a probe can have to be longer to provide sufficiently specific hybridization, as compared to a probe which is used to detect a target sequence which is present in a shorter fragment of DNA. For example, in some diagnostic methods, a portion of an AKAP gene can first be amplified and thus isolated from the rest of the chromosomal DNA and then hybridized to a probe. In such a situation, a shorter probe will likely provide sufficient specificity of hybridization. For example, a probe having a nucleotide sequence of about 10 nucleotides can be sufficient.

[0233] Primers and probes (RNA, DNA (single-stranded or double-stranded), PNA and their analogs) described herein can be labeled with any detectable reporter or signal moiety including, but not limited to radioisotopes, enzymes, antigens, antibodies, spectrophotometric reagents, chemiluminescent reagents, fluorescent and any other light producing chemicals. Additionally, these probes can be modified without changing the substance of their purpose by terminal addition of nucleotides designed to incorporate restriction sites or other useful sequences, proteins, signal generating ligands such as acridinium esters, and/or paramagnetic particles.

[0234] These probes can also be modified by the addition of a capture moiety (including, but not limited to para-magnetic particles, biotin, fluorescein, dioxigenin, antigens, antibodies) or attached to the walls of microtiter trays to assist in the solid phase capture and purification of these probes and any DNA or RNA hybridized to these probes. Fluorescein can be used as a signal moiety as well as a capture moiety, the latter by interacting with an anti-fluorescein antibody.

[0235] Any probe, primer or antisense molecule can be prepared according to methods well known in the art and described, e.g., in Sambrook, J. Fritsch, E. F., and Maniatis, T. (1989(Molecular Cloning: A Laboratory Manual, Cold Spring Harbor Laboratory Press, Cold Spring Harbor, N.Y. For example, discrete fragments of the DNA can be prepared and cloned using restriction enzymes. Alternatively, probes and primers can be prepared using the Polymerase Chain Reaction (PCR) using primers having an appropriate sequence.

[0236] Oligonucleotides can be synthesized by standard methods known in the art, e.g. by use of an automated DNA synthesizer (such as are commercially available from Biosearch (Novato, Calif.); Applied Biosystems (Foster City, Calif.) and other methods). As examples, phosphorothioate oligonucleotides can be synthesized by the method of Stein et al. (1988, Nucl. Acids Res. 16:3209), methylphosphonate oligonucleotides, for example, can be prepared by use of controlled pore glass polymer supports (Sarin et al., 1988, Proc. Natl. Acad. Sci. U.S.A. 85:7448-7451).

[0237] Probes and primers used in the methods of detecting allelic variants in human AKAP10 genes are of sufficient length to specifically hybridize to portions of AKAP10 gene at polymorphic sites. Typically such lengths depend upon the complexity of the source organism genome. For humans such lengths are at least 14-16 nucleotides, and typically can be 20, 30, 50, 100 or more nucleotides.

[0238] The methods of detecting polymorphisms in human AKAP10 genes provided herein, probes and primers include the following:

[0239] (1) at least 14 or 16 contiguous nucleotides of the AKAP10 allele or complement thereof, wherein nucleic acid molecule includes at least 5 contiguous nucleotides from nucleotide 2069 to nucleotide 2077 of SEQ. ID. NO: 3;

[0240] (2) at least 14 or 16 contiguous nucleotides of the AKAP10 allele or complement thereof, wherein the nucleic acid includes the nucleotide at position 2073 of SEQ ID No. 1 replaced with G, C or T.

[0241] (3) at least 14 or 16 contiguous nucleotides of the AKAP10 allele or complement thereof, wherein the nucleic acid molecule includes at least 5 contiguous nucleotides from nucleotide 129556 to nucleotide 129604 of SEQ. ID. NO: 14;

[0242] (4) at least 14 or 16 contiguous nucleotides of the AKAP10 allele or complement thereof, wherein the nucleic acid includes the nucleotide at position 129600 of SEQ ID No. 17 replaced with A, C or T;

[0243] (5) at least 14 or 16 contiguous nucleotides of the AKAP10 allele or complement thereof, wherein the nucleic acid molecule includes at least 5 contiguous nucleotides from nucleotide 83583 to nucleotide 83591 of SEQ. ID. NO: 13;

[0244] (6) at least 14 or 1 6 contiguous nucleotides of the AKAP10 allele or complement thereof, wherein the nucleic acid includes the nucleotide at position 83587 of SEQ ID No. 17 replaced with G, A or T;

[0245] (7) at least 14 or 16 contiguous nucleotides of the AKAP10 allele or complement thereof, wherein the nucleic acid molecule includes at least 5 contiguous nucleotides from nucleotide 156,273 to nucleotide 156281 of SEQ. ID. NO: 18;

[0246] (8) at least 14 or 16 contiguous nucleotides of the AKAP10 allele or complement thereof, wherein the nucleic acid includes the nucleotide at position 156277 of SEQ ID No. 17 replaced with C, A or G;

[0247] With respect to each of the above described probes and primers, they have fewer nucleotides than the sequence of nucleotides 138 to 2126 of SEQ. ID. NO: 1 or fewer nucleotides than the sequence of nucleotides 83,580 to 156,577 of SEQ ID NO: 17.

[0248] Antisense compounds can be conveniently and routinely made through the well-known technique of solid phase synthesis. Equipment for such synthesis is sold by several vendors including, for example, Applied Biosystems (Foster City, Calif.). Any other means for such synthesis known in the art can additionally or alternatively be employed. It is well known to use similar techniques to prepare oligonucleotides such as the phosphorothioates and alkylated derivatives.

[0249] Antisense compounds are typically 8 to 30 nucleotides in length complementary to a targeted to a nucleic acid molecule and modulates its expression. The targeted nucleic acid molecule represents the coding strand. For example, for the AKAP10-5 alleleic variant an antisense compound is an antisense oligonucleotide which comprises the complement of at least an 8 nucleotide segment of SEQ ID NO: 3 including the nucleotide at position 2073 of SEQ ID NO: 3.

[0250] An antisense compound can contain at least one modified nucleotide which can confer nuclease resistance or increase the binding of the antisense compound with the target nucleotide. The antisense compound can containing at least one internucleoside linkage wherein the modified internucleoside linkage of the antisense oligonucleotide can be a phosphorothioate linkage, a morpholino linkage or a peptide-nucleic acid linkage.

[0251] Typical modified oligonucleotide backbones that do not include a phosphorus atom therein have backbones that are formed by short chain alkyl or cycloalkyl internucleoside linkages, mixed heteroatom and alkyl or cycloalkyl internucleoside linkages, or one or more short chain heteroatomic or heterocyclic internucleoside linkages. These include those having morpholino linkages (formed in part from the sugar portion of a nucleoside); siloxane backbones; sulfide, sulfoxide and sulfone backbones; formacetyl and thioformacetyl backbones; methylene formacetyl and thioformacetyl backbones; alkene containing backbones; sulfamate backbones; methyleneimino and methylenehydrazino backbones; sulfonate and sulfonamide backbones; amide backbones; and others having mixed N, O, S and CH₂ component parts.

[0252] Representative United States patents that teach the preparation of the above oligonucleosides include, but are not limited to, U.S. Pat. Nos.: 5,034,506; 5,166,315; 5,185,444; 5,214,134; 5,216,141; 5,235,033; 5,264,562; 5,264,564; 5,405,938; 5,434,257; 5,466,677; 5,470,967; 5,489,677; 5,541,307; 5,561,225; 5,596,086; 5,602,240; 5,610,289; 5,602,240; 5,608,046; 5,610,289; 5,618,704; 5,623,070; 5,663,312; 5,633,360; 5,677,437; and 5,677,439, each of which is herein incorporated by reference.

[0253] An antisense compound can contain at least one least one modified sugar moiety wherein the modified sugar moiety of the antisense oligonucleotide is a 2′-O-methoxyethyl sugar moiety or a 2′-dimethylaminooxyethoxy sugar moiety.

[0254] Modified oligonucleotides can also contain one or more substituted sugar moieties. Typical oligonucleotides comprise one of the following at the 2′ position: OH; F; O—, S—, or N-alkyl; O—, S—, or N-alkenyl; O—, S— or N-alkynyl; or O-alkyl-O-alkyl, wherein the alkyl, alkenyl and alkynyl can be substituted or unsubstituted C₁ to C₁₀ alkyl or C₂ to C₁₀ alkenyl and alkynyl. Exemplary oligonucleotides contain are O[(CH₂)ₙO]ₘCH₃, O(CH₂)ₙOCH₃, O(CH₂)ₙNH₂, O(CH₂)ₙCH₃, O(CH₂)ₙNH₂, and O(CH₂)ₙON[(CH₂)ₙCH₃)]₂, where n and m are from 1 to about 10. Other oligonucleotides comprise one of the following at the 2′ position: C₁ to C₁₀ lower alkyl, substituted lower alkyl, alkaryl, aralkyl, O-alkaryl or O-aralkyl, SH, SCH₃, OCN, Cl, Br, CN, CF₃, OCF₃, SOCH₃, SO₂CH₃, ONO₂, NO₂, N₃, NH₂, heterocycloalkyl, heterocycloalkaryl, aminoalkylamino, polyalkylamino, substituted silyl, an RNA cleaving group, a reporter group, an intercalator, a group for improving the pharmacokinetic properties of an oligonucleotide, or a group for improving the pharmacodynamic properties of an oligonucleotide, and other substituents having similar properties. A typical modification includes an alkoxyalkoxy group, 2′-methoxyethoxy (2′-O—CH₂CH₂OCH₃, also known as 2′-O-(2-methoxyethyl) or 2′-MOE) (Martin et al., Helv. Chim. Acta, 1995, 78, 486-504). Another exemplary modification includes 2′-dimethylaminooxyethoxy, i.e., a O(CH₂)₂ON(CH₃)₂ group, also known as 2′-DMAOE.

[0255] Other modifications include 2′-methoxy (2′-O—CH₃), 2′-aminopropoxy (2′-OCH₂CH₂CH₂NH₂) and 2′-fluoro (2′-F). Similar modifications can also be made at other positions on the oligonucleotide, particularly the 3′ position of the sugar on the 3′ terminal nucleotide or in 2′-5′ linked oligonucleotides and the 5′ position of 5′ terminal nucleotide. Oligonucleotides can also have sugar mimetics such as cyclobutyl moieties in place of the pentofuranosyl sugar. Representative United States patents that teach the reparation of such modified sugar structures include, but are not limited to, U.S. Pat. Nos.: 4,981,957; 5,118,800; 5,319,080; 5,359,044; 5,393,878; 5,446,137; 5,466,786; 5,514,785; 5,519,134; 5,567,811; 5,576,427; 5,591,722; 5,597,909; 5,610,300; 5,627,0531 5,639,873; 5,646,265; 5,658,873; 5,670,633; and 5,700,920, each of which is herein incorporated by reference.

[0256] An antisense compound can contain at least one modified nucleobase. Oligonucleotides can also include nucleobase (often referred to in the art simply as “base”) modifications or substitutions. As used herein, “unmodified” or “natural” nucleobases include the purine bases adenine (A) and guanine (G), and the pyrimidine bases thymine (T), cytosine (C) and uracil (U). Modified nucleobases include other synthetic and natural nucleobases such as 5-methylcytosine (5-me-C), 5-hydroxymethyl cytosine, xanthine, hypoxanthine, 2-aminoadenine, 6-methyl and other alkyl derivatives of adenine and guanine, 2-propyl and other alkyl derivatives of adenine and guanine, 2-thiouracil, 2-thiothymine and 2-thiocytosine, 5-halouracil and cytosine, 5-propynyl uracil and cytosine, 6-azo uracil, cytosine and thymine, 5-uracil (pseudouracil), 4-thiouracil, 8-halo, 8-amino, 8-thiol, 8-thioalkyl, 8-hydroxyl and other 8-substituted adenines and guanines, 5-halo particularly 5-bromo, 5-trifluoromethyl and other 5-substituted uracils and cytosines, 7-methylguanine and 7-methyladenine, 8-azaguanine and 8-azaadenine, 7-deazaguanine and 7-deazaadenine and 3-deazaguanine and 3-deazaadenine.

[0257] Further nucleobases include those disclosed in U.S. Pat. No. 3,687,808, those disclosed in The Concise Encyclopedia Of Polymer Science And Engineering, pages 858-859, Kroschwitz, J. I., ed. John Wiley & Sons, 1990, those disclosed by Englisch et al., Angewandte Chemie, International Edition, 1991, 30, 613, and those disclosed by Sanghvi, Y. S., Crooke, S. T., and Lebleu, B. eds., Antisense Research and Applications, CRC Press, Boca Raton, 1993, pp. 289-302. Certain of these nucleobases are particularly useful for increasing the binding affinity of the oligomeric compounds of the invention. These include 5-substituted pyrimidines, 6-azapyrimidines and N-2, N-6 and O-6 substituted purines, including 2-aminopropyl-adenine, 5-propynyluracil and 5-propynylcytosine. 5-methylcytosine substitutions have been shown to increase nucleic acid duplex stability by 0.6-1.2.degree. C. (Sanghvi, Y. S., Crooke, S. T. and Lebleu, B., eds., Antisense Research and Applications, CRC Press, Boca Raton, 1993, pp. 276-278) and are typical base substitutions, even more particularly when combined with 2′-O-methoxyethyl sugar modifications.

[0258] The antisense compound can be a chimeric oligonucleotide. Chimeric antisense compounds can be formed as composite structures of two or more oligonucleotides, modified oligonucleotides, oligonucleosides and/or oligonucleotide mimetics as described above. Such compounds have also been referred to in the art as hybrids or gapmers. Representative United States patents that teach the preparation of such hybrid structures include, but are not limited to, U.S. Pat. Nos.: 5,013,830; 5,149,797; 5,220,007; 5,256,775; 5,366,878; 5,403,711; 5,491,133; 5,565,350; 5,623,065; 5,652,355; 5,652,356; and 5,700,922, each of which is herein incorporated by reference.

E. Measuring and Electrocardiogram

[0259] Devices that can be used to measure an electrocardiogram are referred to as electrocardiographs. A variety of electrocardiographs are well known in the art and include, for example, those disclosed is U.S. Pat. Nos. 4,377,813, 4,483,346, 4,98,479, 4,840,183, 4,974599. Any known electrocardiograph can be used in the methods provided herein. Methods of using electrocardiographs to determine P-R interval and Q-T interval also are well known in the art, and any such method can be used in the methods provided herein.

F. Association of AKAP10 Allelic Variants with Morbidity or Increased Mortality

[0260] Polymorphisms of the genome can lead to altered gene function, protein function or mRNA instability. To identify those polymorphisms that have clinical relevance is the goal of a world-wide scientific effort. Discovery of such polymorphisms will have a fundamental impact on the identification and development of diagnostics and drug discovery. The strategy to identify valuable polymorphisms is cumbersome and dependent upon the availability of many large patient and control cohorts to show disease association. Furthermore, genes, and their associated polymorphisms, that cause a general risk of the population to suffer from any disease will escape these case/control studies entirely.

[0261] A morbidity susceptibility gene could be a gene that is expressed in many different cell types or tissues (housekeeping gene) and its altered function can facilitate the expression of a clinical phenotype caused by a disease-specific susceptibility gene that is involved in a pathway specific for this disorder. In other words, morbidity susceptibility genes might predispose people to develop a distinct disease according to their genetic make-up for this disease. Candidates for these genes can involve basic cellular processes such as: transcription, translation, heat-shock proteins, protein trafficking, DNA repair, assembly systems for subcellular structures (e.g., mitochondria, peroxysomes and other cellular microbodies), receptor signaling cascades, immunology, etc. Those pathways control the quality of life at the cellular level as well as for the entire organism. Mutations/polymorphisms located in genes encoding proteins for those pathways can reduce the fitness of cells and make the organism more susceptible to express the clinical phenotype caused by the action of a disease-specific susceptibility gene. Therefore, these morbidity susceptibility genes can be potentially involved in a whole variety of different complex diseases if not in all.

[0262] An example of possible candidate morbidity susceptibility genes are mutants of the A kinase anchoring protein (AKAP) genes. Protein phosphorylation is an important mechanism for enzyme regulation and signal transduction in eukaryotic cells. cAMP dependent protein kinase (PKA) mediates a variety of hormonal and neurotransmitter responses by phosphorylating a wide variety of substrates including enzymes, membrane receptors, ion channels and transcription factors. AKAPs direct the subcellular localization of cAMP-dependent protein kinase by binding to its regulatory subunits and therefore plays a role in G-protein mediated receptor-signaling pathways. (Huang et al. Proc. Natl. Acad. Sci., USA 94:11184, 1997). AKAPs have a PKA binding region located in their COOH-terminal portion.

[0263] Polymorphic AKAP genes, such as those provided herein, serve as markers for detecting predisposition to disease and various conditions. Also, the AKAP alleles and gene products, especially the AKAP10-5 gene product should be suitable pharmaceutical targets and gene therapy targets.

[0264] In a further allele, designated AKAP10-7 contains a single nucleotide polymorphism (SNP), a G-to-A transition, at nucleotide position 129,600 of the human chromosome 17 sequence (also referred to herein as SNP “In10”). This SNP is located four bases 3′ to the exon 10/intron 10 boundary of AKAP10 gene. Another identified SNP, AKAP10-1 is an allelic variant with a T to C transversion at nucleotide position 156,277 of the AKAP10 genomic clone which is located in the 3′ untranslated region of the gene (also referred to herein as SNP “3′ UTR”).

[0265] Utilizing a healthy patient database, the frequency of occurrence of two allelic variants of the AKAP10 gene, AKAP10-5 and AKAP10-1, in such a population were found to decrease with age. The AKAP10-5 and AKAP10-1 alleles are useful markers for predicting susceptibility to morbidity and/or increased or early mortality. The methods provided herein can be used for predicting susceptibility to morbidity, increased or early mortality, or morbidity and increased mortality, by detecting the presence of the various AKAP10 allelic variants known in the art or dislcosed herein, individually, or in combination with other AKAP10 allelic variants, in an organism, particularly an animal and particularly a human. AKAP10-5 and other allelic variants of the AKAP10 gene known in the art or dislcosed herein are potential functional variants of a morbidity susceptibility gene and/or of a gene involved in increased mortality and/or a gene related to an alteration in signal transduction and associated disorders and thus is useful for screening for potential therapeutics.

G. Effect of Allelic Variants

[0266] The effect of an allelic variant on a AKAP10 gene expression (amount of mRNA, mRNA stability) and AKAP protein (amount, stability, intracellular localization, activity) can be determined according to methods known in the art. Allelic variants of AKAP genes can be assayed individually or in combination.

[0267] In general, any method known to those skilled in the art of determining the presence or absence of a specific messenger RNA transcript or a specific translated protein can be used to presence of absence of a polymorphic protein or a polymorphism in the genetic sequence.

[0268] 1. RNA Analysis

[0269] a. Northern Blot Detection of RNA

[0270] The northern blot technique is used to identify a RNA fragment of a specific size from a complex population of RNA using gel electrophoresis and nucleic acid hybridization. Northern blotting is a well-known technique in the art. Northern blot analysis is commonly used to detect specific RNA transcripts expressed in a variety of biological samples and have been described in Sambrook, J. et al. (Molecular Cloning, 3^{rd} Edition, Cold Spring Harbor Press).

[0271] Briefly, total RNA is isolated from any biological sample by the method of Chomczynski and Sacchi (Anal. Biochem. (1987) 162, 156-159). Poly-adenylated mRNA is purified from total RNA using mini-oligo (dT) cellulose spin column kit with methods as outlined by the suppliers (Invitrogen, Carlsbad Calif.). Denatured RNA is electrophoresed through a denaturing 1.5% agarose gel and transferred onto a nitrocellulose or nylon based matrix. The mRNAs are detected by hybridization of a radiolabeled or biotinylated oligonucleotide probe specific to the polymorphic regions as disclosed herein.

[0272] b. Dot Blot/Slot Blot

[0273] Specific RNA transcripts can be detected using dot and slot blot assays to evaluate the presence of a specific nucleic acid sequence in a complex mix of nucleic acids. Specific RNA transcripts can be detected by adding the RNA mixture to a prepared nitrocellulose or nylon membrane. RNA is detected by the hybridization of a radiolabeled or biotinylated oligonucleotide probe complementary to the AKAP sequences as disclosed herein.

[0274] c. RT-PCR

[0275] The RT-PCR reaction can be performed, as described by K.-Q. Hu et al., Virology 181:721-726 (1991), as follows: the extracted mRNA is transcribed in a reaction mixture 1 micromolar antisense primer, and 25 U AMV (avian myeloblastosis virus) or MMLV (Moloney murine leukemia virus) reverse transcriptase. Reverse transcription is performed and the cDNA is amplified in a PCR reaction volume with Taq polymerase. Optimal conditions for cDNA synthesis and thermal cycling can be readily determined by those skilled in the art.

[0276] 2. Protein and Polypeptide Detection

[0277] a. Expression of Protein in a Cell Line

[0278] Using the disclosed nucleic acids AKAP10 proteins can be expressed in a recombinantly engineered cell such as bacteria, yeast, insect, mammalian, or plant cells. Those of skill in the art are knowledgeable in the numerous expression systems available for expression of a nucleic acid encoding proteins such as polymorphic human AKAP10 proteins.

[0279] b. Expression of AKAP Protein

[0280] The isolated nucleic acid encoding a full-length polymorphic human AKAP10 protein, or a portion thereof, such as a fragment containing the site of the polymorphism, can be introduced into a vector for transfer into host cells. Fragments of the polymorphic human AKAP10 proteins can be produced by those skilled in the art, without undue experimentation, by eliminating portions of the coding sequence from the isolated nucleic acids encoding the full-length proteins.

[0281] Expression vectors are used expression of the protein in the host cell is desired. An expression vector includes vectors capable of expressing nucleic acids that are operatively linked with regulatory sequences, such as promoter regions, that are capable of effecting expression of such nucleic acids. Thus, an expression vector refers to a recombinant DNA or RNA construct, such as a plasmid, a phage, recombinant virus or other vector that, upon introduction into an appropriate host cell, results in expression of the cloned DNA. Appropriate expression vectors are well known to those of skill in the art and include those that are replicable in eukaryotic cells and/or prokaryotic cells and those that remain episomal or those which integrate into the host cell genome. Such plasmids for expression of polymorphic human AKAP10-encoding nucleic acids in eukaryotic host cells, particularly mammalian cells, include cytomegalovirus (CMV) promoter-containing vectors, such as pCMV5, the pSV2dhfr expression vectors, which contain the SV40 early promoter, mouse dhfr gene, SV40 polyadenylation and splice sites and sequences necessary for maintaining the vector in bacteria, and MMTV promoter-based vectors.

[0282] The nucleic acids encoding polymorphic human AKAP10 proteins, and vectors and cells containing the nucleic acids as provided herein permit production of the polymorphic proteins, as well as antibodies to the proteins. This provides a means to prepare synthetic or recombinant polymorphic human AKAP10 proteins and fragments thereof that are substantially free of contamination from other AKAPs and proteins in general, the presence of which can interfere with analysis of the polymorphic proteins. In addition, the polymorphic proteins can be expressed in combination with selected other proteins that AKAP10 can associate with in cells. The ability to selectively express the polymorphic AKAP10 proteins alone or in combination with other selected proteins makes it possible to observe the functioning of the recombinant polymorphic proteins within the environment of a cell. The expression of isolated nucleic acids encoding an AKAP protein will typically be achieved by operably linking, for example, the DNA or cDNA to a promoter (which is either constitutive or regulatable), followed by incorporation into an expression vector. The vectors can be suitable for replication and integration in either prokaryotes or eukaryotes. Typical expression vectors contain transcription and translation terminators, initiation sequences, and promoters useful for regulation of the expression of the DNA encoding a protein. To obtain high level expression of a cloned gene, it is desirable to construct expression vectors which contain, a strong promoter to direct transcription, a ribosome binding site for translational initiation, and a transcription/translation terminator. One of skill in the art would recognize that modifications can be made to an AKAP10 protein without diminishing its biological activity. Some modifications can be made to facilitate the cloning, expression, or incorporation of the targeting molecule into a fusion protein. Such modifications are well known to those of skill in the art and include, for example, a methionine added at the amino terminus to provide an initiation site, or additional amino acids (e.g., poly His) placed on either terminus to create conveniently located purification sequences. Restriction sites or termination codons can also be introduced. There are expression vectors that specifically allow the expression of functional proteins. One such vector, Plasmid 577, described in U.S. Pat. No. 6,020,122 and incorporated herein by reference, has been constructed for the expression of secreted antigens in a permanent cell line. This plasmid contains the following DNA segments: (a) a fragment of pBR322 containing bacterial beta-lactamase and origin of DNA replication; (b) a cassette directing expression of a neomycin resistance gene under control of HSV-1 thymidine kinase promoter and poly-A addition signals; (c) a cassette directing expression of a dihydrofolate reductase gene under the control of a SV-40 promoter and poly-A addition signals; (d) cassette directing expression of a rabbit immunoglobulin heavy chain signal sequence fused to a modified hepatitis C virus (HCV) E2 protein under the control of the Simian Virus 40 T-Ag promoter and transcription enhancer, the hepatitis B virus surface antigen (HBsAg) enhancer I followed by a fragment of Herpes Simplex Virus-1 (HSV-1) genome providing poly-A addition signals; and (e) a fragment of Simian Virus 40 genome late region of no function in this plasmid. All of the segments of the vector were assembled by standard methods known to those skilled in the art of molecular biology. Plasmids for the expression of secreted AKAP proteins can be constructed by replacing the hepatitis C virus E2 protein coding sequence in plasmid 577 with a AKAP sequence of SEQ ID NO: 3 or a fragment thereof. The resulting plasmid is transfected into CHO/dhfr-cells (DXB-111) (Uriacio, et al., PNAS 77, 4451-4466; 1980); these cells are available from the A.T.C.C., 12301 Parklawn Drive, Rockville, Md. 20852, under Accession No. CRL 9096), using the cationic liposome-mediated procedure (P. L. Feigner et al., PNAS 84:7413-7417 (1987). Proteins are secreted into the cell culture media.

[0283] Incorporation of cloned DNA into a suitable expression vector, transfection of cells with a plasmid vector or a combination of plasmid vectors, each encoding one or more distinct proteins or with linear DNA, and selection of transfected cells are well known in the art (see, e.g., Sambrook et al. (1989) Molecular Cloning: A Laboratory Manual, Second Edition, Cold Spring Harbor Laboratory Press). Heterologous nucleic acid can be introduced into host cells by any method known to those of skill in the art, such as transfection with a vector encoding the heterologous nucleic acid by CaPO₄ precipitation (see, e.g., Wigler et al. (1979) Proc. Natl. Acad. Sci. USA 76:1373-1376) or lipofectamine (GIBCO BRL #18324-012). Recombinant cells can then be cultured under conditions whereby the polymorphic human AKAP10 protein encoded by the nucleic acid is expressed. Suitable host cells include mammalian cells (e.g., HEK293, including but are not limited to, those described in U.S. Pat. No. 5,024,939 to Gorman (see, also, Stillman et al. (1985) Mol. Cell. Biol. 5:2051-2060); also, HEK293 cells available from ATCC under accession #CRL 1573), CHO, COS, BHKBI and Ltk⁻ cells, mouse monocyte macrophage P388D1 and J774A-1 cells (available from ATCC, Rockville, Md.) and others known to those of skill in this art), yeast cells, including, but are not limited to, Pichia pastoris, Saccharomyces cerevisiae, Candida tropicalis, Hansenula polymorpha, human cells and bacterial cells, including, but are not limited to, Escherichia coli. Xenopus oöcytes can also be used for expression of in vitro RNA transcripts of the DNA.

[0284] Heterologous nucleic acid can be stably incorporated into cells or can be transiently expressed using methods known in the art. Stably transfected mammalian cells can be prepared by transfecting cells with an expression vector having a selectable marker gene (such as, for example, the gene for thymidine kinase, dihydrofolate reductase, neomycin resistance, and the like), and growing the transfected cells under conditions selective for cells expressing the marker gene. To prepare transient transfectants, mammalian cells are transfected with a reporter gene (such as the E. coli β-galactosidase gene) to monitor transfection efficiency. Selectable marker genes are not included in the transient transfections because the transfectants are typically not grown under selective conditions, and are usually analyzed within a few days after transfection.

[0285] Heterologous nucleic acid can be maintained in the cell as an episomal element or can-be integrated into chromosomal DNA of the cell. The resulting recombinant cells can then be cultured or subcultured (or passaged, in the case of mammalian cells) from such a culture or a subculture thereof. Methods for transfection, injection and culturing recombinant cells are known to the skilled artisan. Similarly, the polymorphic human AKAP10 proteins or fragments thereof can be purified using protein purification methods known to those of skill in the art. For example, antibodies or other ligands that specifically bind to the proteins can be used for affinity purification and immunoprecipitation of the proteins.

[0286] b. Protein Purification

[0287] The AKAP10 proteins can be purified by standard techniques well known to those of skill in the art. Recombinantly produced proteins can be directly expressed or expressed as a fusion protein. The recombinant protein is purified by a combination of cell lysis (e.g., sonication, French press) and affinity chromatography. The proteins, recombinant or synthetic, can be purified to substantial purity by standard techniques well known in the art, including detergent solubilization, selective precipitation with such substances as ammonium sulfate, column chromatography, immunopurification methods, and others. (See, for example, R. Scopes, Protein Purification: Principles and Practice, Springer-Verlag: New York (1982); Deutscher, Guide to Protein Purification, Academic Press (1990)). For example, antibodies can be raised to the proteins as described herein. Purification from E. coli can be achieved following procedures described in U.S. Pat. No. 4,511,503. The protein can then be isolated from cells expressing the protein and further purified by standard protein chemistry techniques as described herein. Detection of the expressed protein is achieved by methods known in the art and include, for example, radioimmunoassays, Western blotting techniques or immunoprecipitation.

[0288] 3. Immunodetection of the AKAP10 Protein

[0289] Generally, the AKAP proteins, when presented as an immunogen, should elicit production of a specifically reactive antibody. Immunoassays for determining binding are well known to those of skill in the art, as are methods of making and assaying for antibody binding specificity/affinity. Exemplary immunoassay formats include ELISA, competitive immunoassays, radioimmunoassays, Western blots, indirect immunofluorescent assays, in vivo expression or immunization protocols with purified protein preparations. In general, the detection of immunocomplex formation is well known in the art and can be achieved by methods generally based upon the detection of a label or marker, such as any of the radioactive, fluorescent, biological or enzymatic tags. Labels are well known to those skilled in the art (see U.S. Pat. Nos. 3,817,837; 3,850,752; 3,939,350; 3,996,345; 4,277,437; 4,275,149 and 4,366,241, each incorporated herein by reference). Of course, one can find additional advantages through the use of a secondary binding ligand such as a second antibody or a biotin/avidin ligand binding arrangement, as is known in the art.

[0290] a. Production of Polyclonal Antisera Against AKAP

[0291] Antibodies can be raised to AKAP proteins, including individual, allelic, strain, or species variants, and fragments thereof, both in their naturally occurring (full-length) forms and in recombinant forms. Additionally, antibodies are raised to these proteins in either their native configurations or in non-native configurations. Anti-idiotypic antibodies can also be generated. A variety of analytic methods are available to generate a hydrophilicity profile of proteins. Such methods can be used to guide the artisan in the selection of peptides for use in the generation or selection of antibodies which are specifically reactive, under immunogenic conditions. See, e.g., J. Janin, Nature, 277 (1979) 491-492; Wolfenden, et al., Biochemistry 20(1981) 849-855; Kyte and Doolite, J. Mol. Biol. 157 (1982) 105-132; Rose, et al., Science 229 (1985) 834-838.

[0292] A number of immunogens can be used to produce antibodies specifically reactive with AKAP proteins. Isolated recombinant, synthetic, or native polypeptides are typical immunogens (antigen) for the production of monoclonal or polyclonal antibodies. Polypeptides are typically denatured, and optionally reduced, prior to formation of antibodies for screening expression libraries or other assays in which a putative AKAP protein is expressed or denatured in a non-native secondary, tertiary, or quartenary structure.

[0293] The AKAP protein (SEQ ID NO: 4, or a portion thereof) is injected into an animal capable of producing antibodies. Either monoclonal or polyclonal antibodies can be generated for subsequent use in immunoassays to measure the presence and quantity of the protein. Methods of producing polyclonal antibodies are known to those of skill in the art. In brief, an immunogen (antigen), typically a purified protein, a protein coupled to an appropriate carrier (e.g., GST, keyhole limpet hemanocyanin, etc.), or a protein incorporated into an immunization vector such as a recombinant vaccinia virus (see, U.S. Pat. No. 4,722,848) is mixed with an adjuvant and animals are immunized with the mixture. The animal's immune response to the immunogen preparation is monitored by taking test bleeds and determining the titer of reactivity to the protein of interest. When appropriately high titers of antibody to the immunogen are obtained, blood is collected from the animal and antisera are prepared. Further fractionation of the antisera to enrich for antibodies reactive to the protein is performed where desired (See, e.g., Coligan, Current Protocols in Immunology, Wiley/Greene, NY (1991); and Harlow and Lane, Antibodies: A Laboratory Manual, Cold Spring Harbor Press, NY (1989)).

[0294] b. Western Blotting of Tissue Samples for the AKAP Protein

[0295] Biological samples are homogenized in SDS-PAGE sample buffer (50 mM Tris-HCl, pH 6.8, 100 mM dithiothreitol, 2% SDS, 0.1% bromophenol blue, 10% glycerol), heated at 100 degrees Celsius for 10 min and run on a 14% SDS-PAGE with a 25 mM Tris-HCl, pH 8.3, 250 mM Glycine, 0.1% SDS running buffer. The proteins are electrophoretically transferred to nitrocellulose in a transfer buffer containing 39 mM glycine, 48 mM Tris-HCl, pH 8.3, 0.037% SDS, 20% methanol. The nitrocellulose is dried at room temperature for 60 min and then blocked with a PBS solution containing either bovine serum albumin or 5% nonfat dried milk for 2 hours at 4 degrees Celsius.

[0296] The filter is placed in a heat-sealable plastic bag containing a solution of 5% nonfat dried milk in PBS with a 1:100 to 1:2000 dilution of affinity purified anti-AKAP peptide antibodies, incubated at 4 degrees Celsius for 2 hours, followed by three 10 min washes in PBS. An alkaline phosphatase conjugated secondary antibody (i.e., anti-mouse/rabbit IgG), is added at a 1:200 to 1:2000 dilution to the filter in a 150 mM NaCl, 50 mM Tris-HCl, pH 7.5 buffer and incubated for 1 h at room temperature.

[0297] The bands are visualized upon the addition and development of a chromogenic substrate such as 5-bromo-4-chloro-3-indolyl phosphate/nitro blue tetrazolium (BCIP/NBT). The filter is incubated in the solution at room temperature until the bands develop to the desired intensity. Molecular mass determination is made based upon the mobility of pre-stained molecular weight standards (Rainbow markers, Amersham, Arlington Heights, Ill.).

[0298] c. Microparticle Enzyme Immunoassay (MEIA)

[0299] AKAP10 proteins and peptides are detected using a standard commercialized antigen competition EIA assay or polyclonal antibody sandwich EIA assay on the IMx.RTM Analyzer (Abbott Laboratories, Abbott Park, Ill.). Samples containing the AKAP10 protein are incubated in the presence of anti-AKAP10 coated microparticles. The microparticles are washed and secondary polyclonal anti-AKAP10 antibodies conjugated with detectable entities (i.e., alkaline phosphatase) are added and incubated with the microparticles. The microparticles are washed and the bound antibody/antigen/antibody complexes are detected by adding a substrate (i.e. 4-methyl umbelliferyl phosphate) (MUP) that will react with the secondary conjugated antibody to generate a detectable signal.

[0300] d. Immunocytochemistry

[0301] Intracellular localization of the AKAP10 protein can be determined by a variety of in situ hybridization techniques. In one method cells are fixed with fixed in 4% paraformaldehyde in 0.1 M phosphate buffered saline (PBS; pH 7.4) for 5 min., rinsed in PBS for 2 min., dilapidated and dehydrated in an ethanol series (50, 70 and 95%) (5 min. each and stored in 95% ethanol at 4 degrees Celsius).

[0302] The cells are stained with the primary anti-AKAP10 antibody and a mixture of secondary antibodies used for detection. Laser-scanning confocal microscopy is performed to localize the AKAP10 protein.

[0303] 4. Binding Assays

[0304] Assays to measure the interaction between AKAP10 and the regulatory subunits RI and/or RII of the Protein Kinase A holoenzyme include immobilized binding assays, solution binding assays and the like. In some instances, it can be desirable to monitor binding between AKAP10 and PKA. In other instances, it can be desirable to specifically monitor the binding between AKAP10 and a cellular component (other than PKA) to which it binds. Assays can be performed in a variety of formats, including cell-based assays, such as di-hybrid screening or complementation assays as described in U.S. Pat. No. 5,283,173 and Patent Cooperation Treaty (PCT) Publication No. WO 91/16457, respectively. Assays of this type are particularly useful for assessing intracellular efficacy of test compounds. Non-cell-based assays include scintillation proximity assays, cAMP competition assays, ELISA assays, radioimmunoassays, chemiluminescent assays, and the like. Such assay procedures are well known in the art and generally described, e.g., in Boudet et al., J. Immunol. Meth., 142:73-82 (1991); Ngai et al., J. Immunol. Meth., 158:267-276 (1993); Pruslin et al., J. Immunol. Meth., 137:27-35 (1991); Udenfriend et al., Proc. Natl. Acad. Sci. USA, 82:8672-8676 (1985); Udenfriend et al., Anal. Biochem., 161:494-500 (1987); Bosworth and Towers, Nature, 341:167-168 (1989); Gilman, Proc. Natl. Acad. Sci. USA, 67:305-312 (1970); and U.S. Pat. No. 4,568,649.

[0305] a. In Vitro Binding Assay

[0306] Huang et al. Proc. Natl. Acad. Sci. USA, 272:8057-8064 (1997); Protein preparations containing AKAP10 are incubated with glutathione resin in PBS for 2 hours at 4 degrees Celsius with 0.1% Triton X-100, 1 mM phenylmethylsulfonyl fluoride, 1 mM EDTA, 5 mM benzamidine, and 5 mM B-mercapthoethanol and washed extensively with the same buffer. 200 micrograms of PKA regulatory subunit RII and/or RI were added to the resin and incubated at 4 degrees Celsius. Proteins associated with the AKAP10 are eluted and analyzed by Laemmli electrophoresis. The proteins were visualized by Coomassie Staining. PKA proteins can be radiolabeled or labeled with a flurophore to allow detection.

[0307] b. PKA Phosphorylation of Protein Substrate

[0308] Cyclic AMP-dependent protein kinase (PKA) catalyzes the transfer of gamma phosphate from adenosine triphosphate (ATP) to a serine or threonine residue in a protein substrate. A short synthetic peptide (Leucine-Arg-Arg-Alanine-Serine-Leucine-Glycine or LRRASLG) is used as a substrate to assay the specific type of PKA activity as described in Pearson et. al., Methods of Enzymology 200, 62-81 (1991).

[0309] The PKA assay is typically carried out in a reaction of the enzyme with a peptide substrate and gamma 32P-ATP followed by separation of the 32P-peptide product from the unreacted gamma 32P-ATP on a phosphocellulose membrane. This method requires at least one basic amino acid residue in the peptide substrate. The peptide substrate can be tagged with a biotin group so that the biotinylated 32P-peptide product consistently binds to a streptavidin membrane in a manner independent of the peptide sequence as described in Goueli et al Analytical Biochemistry 225, 10-17, (1995). The separation of the 32P-peptide product from the free gamma 32P-ATP using affinity binding and ultrafiltration separation to analyze a mixture sample as described in U.S. Pat. No. 5,869,275.

[0310] If the mutation is located in an intron, the effect of the mutation can be determined, e.g., by producing transgenic animals in which the allelic variant has been introduced and in which the wild-type gene or predominant allele can have been knocked out. Comparison of the level of expression of the protein in the mice transgenic for the allelic variant with mice transgenic for the predominant allele will reveal whether the mutation results in increased or decreased synthesis of the associated protein and/or aberrant tissue distribution or intracellular localization of the associated protein. Such analysis could also be performed in cultured cells, in which the human variant allele gene is introduced and, e.g., replaces the endogenous gene in the cell. For mutant AKAP proteins binding to signaling enzymes such as PKA is also examined. Thus, depending on the effect of the alteration a specific treatment can be administered to a subject having such a mutation. Accordingly, if the mutation results in decreased production of AKAP protein, the subject can be treated by administration of a compound which increases synthesis, such as by increasing AKAP gene expression, and wherein the compound acts at a regulatory element different from the one which is mutated. Alternatively, if the mutation results in increased AKAP protein, the subject can be treated by administration of a compound which reduces protein production, e.g., by reducing AKAP gene expression or a compound which inhibits or reduces the activity of AKAP protein.

H. Diagnostic and Prognostic Assays

[0311] Typically, an individual allelic variant that associates with morbidity and/or mortality and/or an alteration in signal transduction will not be used in isolation as a prognosticator. An allelic variant typically will be one of a plurality of indicators that are used. The other indicators can be the manifestation of other risk factors for morbidity and/or mortality and other evidence of altered signal transduction.

[0312] Useful combinations of allelic variants of the AKAP10 gene can be determined. Variants can be assayed individually or assayed simultaneously using multiplexing methods as described above or any other labelling method that allows different variants to be identified. In particular, variants of the AKAP10 gene can be assayed using kits (see below) or any of a variety microarrays known to those in the art. For example, oligonucleotide probes comprising the polymorphic regions surrounding any polymorphism in the AKAP10 gene can be designed and fabricated using methods such as those described in U.S. Pat. Nos. 5,492,806; 5,525,464; 5,695,940; 6,018,041; 6,025,136; WO 98/30883; WO 98/56954; WO99/09218; WO 00/58516; WO 00/58519, or references cited therein.

I. Databases

[0313] Use of databases containing sets of parameters associated with subjects in populations selected on the basis of apparent good health, not manifesting detectable disease (i.e., an unbiased population not selected for any disease state), allows for identification of such morbidity susceptibility genes (see, U.S. Provisional Application Ser. No. 60/159,176 filed Oct. 13, 1999, U.S. Provisional Application Ser. No. 60/217,658 filed on Jul. 10, 2000 and U.S. application Ser. No. 09/687,483 filed Oct. 13, 2000).

[0314] For example, in a method for determining susceptibility to morbidity, increased or early mortality, or morbidity and increased or early mortality in a human being, provided herein, exemplary steps include detecting the presence or absence of an allele of the human AKAP10 containing other than an A at position 2073 of the coding sequence of the AKAP10 gene; wherein the presence of an allele containing other than an A at position 2073 is indicative of increased susceptibility to morbidity, increased or early mortality, or morbidity and increased or early mortality as compared to the susceptibility of a human being who does not comprise an allele containing other than an A at position 2073 of the AKAP10 gene coding sequence.

[0315] As noted above, using a healthy patient database (see, U.S. Provisional Application Ser. No. 60/159,176, U.S. Provisional Application Ser. No. 60/217,658 and U.S. application Ser. No. 09/687,483 filed Oct. 13, 2000), the frequency of occurrence of the AKAP10-5 SNP in such a population was found to decrease with age, thus making the allele a potential morbidity susceptibility gene, a gene associated with increased mortality or both. Using the healthy database, it was found that the homozygote GG genotype drops in the elderly population (over>60 years), by a statistically significant amount, p=0.02.

J. Isolation of Polymorphic AKAP10 Gene Sequences

[0316] Exemplary nucleic acid sequences encoding polymorphic human AKAP10 proteins are represented by nucleotides which encode the amino acid sequence as set forth in SEQ. ID. NO: 3. Such polymorphic nucleotide sequences can encode variant amino acid sequences, such as the sequence set forth in SEQ. ID. NO: 4 in which amino acid 646 has been replaced with a valine; other amino acid sequence variants at amino acid 646 include leucine or phenylalanine.

[0317] Other exemplary nucleic acid sequences represent allelic variants of the AKAP10 gene which are not located in protein coding regions. Such as set forth in nucleotide position 83,580 to position 156,577 of SEQ ID NO: 13, 14 and 18.

[0318] Nucleic acid encoding polymorphic human AKAP10 proteins and genes provided herein can be isolated by screening suitable human cDNA or human genomic libraries under suitable hybridization conditions with nucleic acids such as those provided in SEQ. ID. NOS: 1, 3, 13, 14, 17 and 18. Suitable libraries can be prepared from human tissue and cell samples. In order to isolate cDNA encoding a polymorphic human AKAP10 libraries prepared from different tissues can be screend since the allele can not be expressed in all tissues or at similar levels in different tissues. The library can be screened with a portion of DNA including substantially the entire human AKAP10 or polymorphic AKAP10 protein-encoding sequence as set forth in SEQ. ID. NOS. 1, 3, 13, 14, 17 and 18, or the library can be screened with a suitable probe.

[0319] After screening the library, positive clones are identified by detecting a hybridization signal; the identified clones are characterized by restriction enzyme mapping and/or DNA sequence analysis, and then examined, by comparison with the sequences set forth herein to ascertain whether they include DNA encoding a complete polymorphic human AKAP10 protein (i.e., if they include translation initiation and termination codons). If the selected clones are incomplete, they can be used to rescreen the same or a different library to obtain overlapping clones. If the library is genomic, then the overlapping clones can include exons and introns. If the library is a cDNA library, then the overlapping clones will include an open reading frame. In both instances, clones can be identified by comparison with the DNA and encoded proteins provided herein.

[0320] In an alternative method, oligonucleotides based on the human AKAP10 or polymorphic AKAP10 protein-encoding sequence as set forth in SEQ. ID. NOS. 1, 3, 13, 14, 17 and 18, can be used to amplify fragments of the protein coding region of the AKAP10 gene from human cDNA or genomic sequence.

[0321] The isolated nucleic acid sequences can be incorporated into vectors for further manipulation. As used herein, vector (or plasmid) refers to discrete elements that are used to introduce heterologous DNA into cells for either expression or replication thereof. Selection and use of such vehicles are well within the skill of the artisan.

K. Transgenic Animals

[0322] Methods for making transgenic animals using a variety of transgenes have been described in Wagner et al., Proc. Nat. Acad. Sc. U.S.A., Vol. 78, p. 5016, 1981; Stewart et al., Science, Vol. 217, p. 1046, 1982; Constantini et al, Nature, Vol. 294, p. 92, 1981; Lacy et al., Cell, Vol. 34, p. 343, 1983; McKnight et al., Cell, Vol. 34, p. 335, 1983; Brinstar et al., Nature, Vol. 306, p. 332, 1983; Palmiter et al., Nature, Vol. 300, p. 611, 1982; Palmiter et al., Cell, Vol. 29, p. 701, 1982 and Palmiter et al., Science, Vol. 222, p. 809, 1983. Such methods are described in U.S. Pat. Nos. 6,175,057; 6,180,849 and 6,133,502.

[0323] The term “transgene” is used herein to describe genetic material that has been or is about to be artificially inserted into the genome of a mammalian cell, particularly a mammalian cell of a living animal. The transgene is used to transform a cell, meaning that a permanent or transient genetic change, typically a permanent genetic change, is induced in a cell following incorporation of exogenous DNA. A permanent genetic change is generally achieved by introduction of the DNA into the genome of the cell. Vectors for stable integration include, but are not limited to, plasmids, retroviruses and other animal viruses and YACS. Of interest are transgenic mammals, including, but are not limited to, cows, pigs, goats, horses and others, and particularly rodents, including rats and mice. Typically, the transgenic-animals are mice.

[0324] Transgenic animals contain an exogenous nucleic acid sequence present as an extrachromosomal element or stably integrated in all or a portion of its cells, especially germ cells. Unless otherwise indicated, it will be assumed that a transgenic animal comprises stable changes to the germline sequence. During the initial construction of the animal, “chimeras” or “chimeric animals” are generated, in which only a subset of cells have the altered genome. Chimeras are primarily used for breeding purposes in order to generate the desired transgenic animal. Animals having a heterozygous alteration are generated by breeding of chimeras. Male and female heterozygotes are typically bred to generate homozygous animals.

[0325] The exogenous gene is usually either from a different species than the animal host, or is otherwise altered in its coding or non-coding sequence. The introduced gene can be a wild-type gene, naturally occurring polymorphism or a genetically manipulated sequence, for example having deletions, substitutions or insertions in the coding or non-coding regions. When the introduced gene is a coding sequence, it is usually operably linked to a promoter, which can be constitutive or inducible, and other regulatory sequences required for expression in the host animal.

[0326] Transgenic animals can comprise other genetic alterations in addition to the presence of alleles of AKAP genes. For example, the genome can be altered to affect the function of the endogenous genes, contain marker genes, or contain other genetic alterations (e.g., alleles of other genes associated with cardiovascular disease).

[0327] A “knock-out” of a gene means an alteration in the sequence of the gene that results in a decrease of function of the target gene, typically such that target gene expression is undetectable or insignificant. A knock-out of an endogenous AKAP gene means that function of the gene has been substantially decreased so that expression is not detectable or only present at insignificant levels. “Knock-out” transgenics can be transgenic animals having a heterozygous knock-out of an AKAP gene or a homozygous knock-out. “Knock-outs” also include conditional knock-outs, where alteration of the target gene can occur upon, for example, exposure of the animal to a substance that promotes target gene alteration, introduction of an enzyme that promotes recombination at the target gene site (e.g., Cre in the Cre-lox system), or other method for directing the target gene alteration postnatally.

[0328] A “knock-in” of a target gene means an alteration in a host cell genome that results in altered expression (e.g., increased (including ectopic)) of the target gene, e.g., by introduction of an additional copy of the target gene, or by operatively inserting a regulatory sequence that provides for enhanced expression of an endogenous copy of the target gene. “Knock-in” transgenics of interest can be transgenic animals having a knock-in of an AKAP gene. Such transgenics can be heterozygous or homozygous for the knock-in gene. “Knock-ins” also encompass conditional knock-ins.

[0329] A construct is suitable for use in the generation of transgenic animals if it allows the desired level of expression of an AKAP encoding sequence or the encoding sequence of another gene associated with cardiovascular disease. Methods of isolating and cloning a desired sequence, as well as suitable constructs for expression of a selected sequence in a host animal, are well known in the art and are described below.

[0330] For the introduction of a gene into the subject animal, it is generally advantageous to use the gene as a gene construct wherein the gene is ligated downstream of a promoter capable of and operably linked to expressing the gene in the subject animal cells. Specifically, a transgenic non-human mammal showing high expression of the desired gene can be created by microinjecting a vector ligated with the gene into a fertilized egg of the subject non-human mammal (e.g., rat fertilized egg) downstream of various promoters capable of expressing the protein and/or the corresponding protein derived from various mammals (rabbits, dogs, cats, guinea pigs, hamsters, rats, mice etc., typicall rats etc.) Useful vectors include Escherichia coli-derived plasmids, Bacillus subtilis-derived plasmids, yeast-derived plasmids, bacteriophages such as lambda, phage, retroviruses such as Moloney leukemia virus, and animal viruses such as vaccinia virus or baculovirus.

[0331] Useful promoters for such gene expression regulation include, for example, promoters for genes derived from viruses (cytomegalovirus, Moloney leukemia virus, JC virus, breast cancer virus etc.), and promoters for genes derived from various mammals (humans, rabbits, dogs, cats, guinea pigs, hamsters, rats, mice etc.) and birds (chickens etc.) (e.g., genes for albumin, insulin II, erythropoietin, endothelin, osteocalcin, muscular creatine kinase, platelet-derived growth factor beta, keratins K1, K10 and K14, collagen types I and II, atrial natriuretic factor, dopamine beta-hydroxylase, endothelial receptor tyrosine kinase (generally abbreviated Tie2), sodium-potassium adenosine triphosphorylase (generally abbreviated Na,K-ATPase), neurofilament light chain, metallothioneins I and IIA, metalloproteinase I tissue inhibitor, MHC class I antigen (generally abbreviated H-2L), smooth muscle alpha actin, polypeptide chain elongation factor 1 alpha (EF-1 alpha), beta actin, alpha and beta myosin heavy chains, myosin light chains 1 and 2, myelin base protein, serum amyloid component, myoglobin, renin etc.).

[0332] In one embodiment, the above-mentioned vectors have a sequence for terminating the transcription of the desired messenger RNA in the transgenic animal (generally referred to as terminator); for example, gene expression can be manipulated using a sequence with such function contained in various genes derived from viruses, mammals and birds. In one example, the simian virus SV40 terminator etc. are commonly used. Additionally, for the purpose of increasing the expression of the desired gene, the splicing signal and enhancer region of each gene, a portion of the intron of a eukaryotic organism gene can be ligated 5′ upstream of the promoter region, or between the promoter region and the translational region, or 3′ downstream of the translational region as desired.

[0333] A translational region for a protein of interest can be obtained using the entire or portion of genomic DNA of blood, kidney or fibroblast origin from various mammals (humans, rabbits, dogs, cats, guinea pigs, hamsters, rats, mice etc.) or of various commercially available genomic DNA libraries, as a starting material, or using complementary DNA prepared by a known method from RNA of blood, kidney or fibroblast origin as a starting material. Also, an exogenous gene can be obtained using complementary DNA prepared by a known method from RNA of human fibroblast origin as a starting material. All these translational regions can be used in transgenic animals.

[0334] To obtain the translational region, it is possible to prepare DNA incorporating an exogenous gene encoding the protein of interest in which the gene is ligated downstream of the above-mentioned promoter (typically upstream of the translation termination site) as a gene construct capable of being expressed in the transgenic animal.

[0335] DNA constructs for random integration need not include regions of homology to mediate recombination. Where homologous recombination is desired, the DNA constructs will comprise at least a portion of the target gene with the desired genetic modification, and will include regions of homology to the target locus. Conveniently, markers for positive and negative selection are included. Methods for generating cells having targeted gene modifications through homologous recombination are known in the art. For various techniques for transfecting mammalian cells, see Keown et al. (1990) Methods in Enzymology 185:527-537.

[0336] The transgenic animal can be created by introducing an AKAP gene construct into, for example, an unfertilized egg, a fertilized egg, a spermatozoon or a germinal cell containing a primordial germinal cell thereof, typically in the embryogenic stage in the-development of a non-human mammal (more typically in the single-cell or fertilized cell stage and generally before the 8-cell phase), by standard means, such as the calcium phosphate method, the electric pulse method, the lipofection method, the agglutination method, the microinjection method, the particle gun method, the DEAE-dextran method and other such method. Also, it is possible to introduce a desired AKAP gene into a somatic cell, a living organ, a tissue cell or other cell, by gene transformation methods, and use it for cell culture, tissue culture and any other method of propagation. Furthermore, these cells can be fused with the above-described germinal cell by a commonly known cell fusion method to create a transgenic animal.

[0337] For embryonic stem (ES) cells, an ES cell line can be employed, or embryonic cells can be obtained freshly from a host, e.g. mouse, rat, guinea pig, etc. Such cells are grown on an appropriate fibroblast-feeder layer or grown in the presence of appropriate growth factors, such as leukemia inhibiting factor (LIF). When ES cells have been transformed, they can be used to produce transgenic animals. After transformation, the cells are plated onto a feeder layer in an appropriate medium. Cells containing the construct can be detected by employing a selective medium. After sufficient time for colonies to grow, they are picked and analyzed for the occurrence of homologous recombination or integration of the construct. Those colonies that are positive can then be used for embryo manipulation and blastocyst injection. Blastocysts are obtained from 4 to 6 week old superovulated females. The ES cells are trypsinized, and the modified cells are injected into the blastocoel of the blastocyst. After injection, the blastocysts are returned to each uterine horn of pseudopregnant females. Females are then allowed to go to term and the resulting litters screened for mutant cells having the construct. By providing for a different phenotype of the blastocyst and the ES cells, chimeric progeny can be readily detected. The chimeric animals are screened for the presence of the modified gene and males and females having the modification are mated to produce homozygous progeny. If the gene alterations cause lethality at some point in development, tissues or organs can be maintained as allogeneic or congenic grafts or transplants, or in in vitro culture.

[0338] Animals containing more than one transgene, such as allelic variants of AKAP genes and/or other genes associated with morbidity and/or mortality can be made by sequentially introducing individual alleles into an animal in order to produce the desired phenotype (manifestation of morbidity and/or predisposition to early mortality).

L. Screening Assays for Modulators

[0339] Modulators of AKAP10 biological activities can be identified by using any of the disclosed methods related to AKAP10 binding to PKA, AKAP10 localization in the mitochondria, binding to other signaling enzymes and phosphorylation by PKA.

[0340] In particular, once a variant protein such as AKAP10-5 is contacted with a potential modulating molecule the effect of the molecule on the binding between AKAP protein and PKA can be determined by using the assays disclosed in the section entitled “Effect of Allelic Variants”. For example mitochondria can be isolated from cells exposed to the potential modulating molecule. PKA protein can then be isolated and quantitated or phosphorylation can be determined using the disclosed PKA assay. An increase in the amount of PKA protein in the mitochondria or the quantity of test peptide phosphorylated by mitochondrial isolated PKA would indicate a positive effect of the test molecule. Binding of AKAP10 protein and PKA could be directly assessed using an in vitro binding assay, or other disclosed binding assays, or by immunoassays such as immunoprecipitation.

[0341] For allelic variants that do not alter the AKAP10 protein the effect of a potential modulating molecule can be assayed by examining PKA RNA using the various methods disclosed for RNA analysis.

M. Ribozymes

[0342] A ribozyme targets the RNA genome and RNA transcripts and copies thereof. Each ribozyme molecule contains a catalytically active segment capable of cleaving the plus or minus strand of RNA, and further comprises flanking sequences having a nucleotide sequence complementary to portions of the target RNA. The flanking sequences serve to anneal the ribozyme to the RNA in a site-specific manner. Absolute complementarity of the flanking sequences to the target sequence is not necessary, however, as only an amount of complementarity sufficient to form a duplex with the target RNA and to allow the catalytically active segment of the ribozyme to cleave at the target sites is necessary. Thus, only sufficient complementarity to permit the ribozyme to be hybridizable with the target RNA is required. In some embodiments of the present invention the enzymatic RNA molecule is formed in a hammerhead motif but the ribozyme can also be formed in the motif of a hairpin, hepatitis delta virus, group I intron or RNAse P RNA (in association with an RNA guide sequence). Examples of hammerhead motifs are described by Rossi et al., AIDS Res. Hum. Retrovir. 8:183 (1992), hairpin motifs are described by Hampel et al., Biochem. 28:4929 (1989) and Hampel et al., Nucl. Acids Res. 18:299 (1990), the hepatitis delta virus motif is exemplified in Perrotta and Been, Biochem. 31:16 (1992), an RNAseP motif is described in Gueerier-Takada et al., Cell 35:849 (1983), and examples of the group I intron motif are described in Cech et al., U.S. Pat. No. 4,987,071, each of the foregoing disclosures being incorporated herein by reference.

[0343] Ribozymes can be prepared by chemical synthesis or produced by recombinant vectors according to methods established for the synthesis of RNA molecules. See, e.g., Sambrook et al., Molecular Cloning, A Laboratory Manual, 2d ed., Cold Spring Harbor Laboratory Press, Cold Spring Harbor, N.Y. (1989), incorporated herein by reference. The ribozyme sequence can be synthesized, for example, using RNA polymerases such as T7 or SP6. The ribozymes can be prepared from a corresponding DNA sequence (DNA which on transcription yields a ribozyme) operably linked to an RNA polymerase promoter such as the promoter for T7 RNA polymerase or SP6 RNA polymerase. A DNA sequence corresponding to a ribozyme can be ligated in to a DNA vector, such as a plasmid, bacteriophage or other virus. Where the transfer vector contains an RNA polymerase promoter operably linked to DNA corresponding to a ribozyme, the ribozyme can be conveniently produced upon incubation with an RNA polymerase. Ribozymes can therefore be produced in vitro by incubation of RNA polymerase with an RNA polymerase promoter operably linked to DNA corresponding to a ribozyme, in the presence of ribonucleotides. In vivo, procaryotic or eucaryotic cells (including mammalian cells) can be transfected with an appropriate vector containing genetic material corresponding to a ribozyme, operably linked to an RNA polymerase promoter such that the ribozyme is transcribed in the host cell. Ribozymes can be directly transcribed in vivo from a transfer vector, or alternatively, can be transcribed as part of a larger RNA molecule. For example, DNA corresponding to ribozyme sequence can be ligated into the 3′ end of a carrier gene, for example, after a translation stop signal. Larger RNA molecules can help to stabilize the ribozyme molecules against nuclease digestion within the cells. On translation the carrier gene can give rise to a protein, whose presence can be directly assayed if desired, for example, by enzymatic reaction when the carrier gene encodes an enzyme.

[0344] Those of skill in the art based on the above description and the sequences disclosed herein can design ribozymes to target RNA representing the allelic variants of the AKAP10 gene. For example, the sequence of anti-AKAP10-5 hammerhead ribozyme is 5-U G C A C U G A N G A G C C U G G A C G A A A C U-3′ (SEQ ID NO: 25). The sequence UGCA is complementary to target RNA with C hybridizing to the G nucleotide at position 2073 of SEQ ID NO: 3 of the AKAP10-5 allelic variant. The simplest hammerhead ribozyme must have UG at the 5′ end of the substrate binding site.

N. Kits

[0345] Kits can be used to indicate whether a subject is at risk of increased susceptibility to morbidity and/or predisposition for premature or increased or early mortality. The kits can also be used to determine if a subject has a genetic predisposition to a disorder related to signal transduction. This information could be used, e.g., to optimize treatment of such individuals as a particular genotype can be associated with drug response.

[0346] The kits comprise a probe or primer which is capable of hybridizing adjacent to or at a polymorphic region of AKAP10 and thereby identifying whether the AKAP10 gene contains an allelic variant which is associated with increased susceptibility to morbidity and/or predisposition for premature or increased or early mortality or a genetic predisposition to a disorder related to signal transduction and/or protein phosphorylation. The kits further comprise instructions for use in carrying out assays, interpreting results and diagnosing a subject as having increased susceptibility to morbidity and/or predisposition for premature or increased or early mortality or a genetic predisposition to a disorder related to signal transduction and/or protein phosphorylation.

[0347] Kits for amplifying a region of AKAP10 gene or other genes associated with morbidity and/or mortality and/or signal transduction comprise two primers which flank a polymorphic region of the gene of interest. For example primers can comprise the sequences of SEQ ID NOs.:5, 6, 7, 10, 12 and 16. For other assays, primers or probes hybridize to a polymorphic region or 5′ or 3′ to a polymorphic region depending on which strand of the target nucleic acid is used. For example, specific probes and primers comprise sequences designated as SEQ ID NOs: 8, 15, 19 and 20. Those of skill in the art can synthesize primers and probes which hybridize adjacent to or at the polymorphic regions described herein and other SNPs in genes associated with morbidity and/or mortality and/or signal transduction

[0348] Yet other kits comprise at least one reagent necessary to perform an assay. For example, the kit can comprise an enzyme, such as a nucleic acid polymerase. Alternatively the kit can comprise a buffer or any other necessary reagent.

[0349] Yet other kits comprise microarrays of probes to detect allelic variants of the AKAP10 gene. The kits further comprise instructions for their use and interpreting the results.

[0350] The following examples are included for illustrative purposes only and are not intended to limit the scope of the invention. The practice of methods and development of the products provided herein employ, unless otherwise indicated, conventional techniques of cell biology, cell culture, molecular biology, transgenic biology, microbiology, recombinant DNA, and immunology, which are within the skill of the art. Such techniques are explained fully in the literature. See, for example, Molecular Cloning A Laboratory Manual, 2nd Ed., ed. by Sambrook, Fritsch and Maniatis (Cold Spring Harbor Laboratory Press: 1989); DNA Cloning, Volumes I and II (D. N. Glover ed., 1985); Oligonucleotide Synthesis (M. J. Gait ed., 1984); Mullis et al. U.S. Pat. No. 4,683,195; Nucleic Acid Hybridizatiion (B. D. Hames & S. J. Higgins eds. 1984); Transcription and Translation (B. D. Hames & S. J. Higgins eds. 1984); Culture of Animal Cells (R. I. Freshney, Alan R. Liss, Inc., 1987); Immobilized Cells and Enzymes (IRL Press, 1986); B. Perbal, A Practical Guide To Molecular Cloning (1984); the treatise, Methods In Enzymology (Academic Press, Inc., New York); Gene Transfer Vectors For Mammalian Cells (J. H. Miller and M. P. Calos eds., 1987, Cold Spring Harbor Laboratory); Methods In Enzymology, Vols. 154 and 155 (Wu et al. eds., Immunochemical Methods In Cell and Molecular Biology (Mayer and Walker, eds., Academic Press, London, 1987); Handbook of Experimental Immunology, Volumes I-IV (D. M. Weir and C. C. Blackwell, eds., 1986); Manipulating the Mouse Embryo, (Cold Spring Harbor Laboratory Press, Cold Spring Harbor, N.Y., 1986).

[0351] The following examples are included for illustrative purposes only and are not intended to limit the scope of the invention.

### EXAMPLES

### Example 1

Isolation of DNA from Blood Samples of a Healthy Donor Population

[0352] The results are provided of a screen comparing allele frequencies of 6,500 SNPs located in approximately 5,000 genes between a sample of young and elderly healthy individuals. This resulted in the identification of a gene encoding a functional variant with an impact on morbidity that can be involved in the etiology of cardiac dysfunction.

[0353] All subjects involved in the studies signed a written informed consent and the institutional ethics committees of participating institutions approved the experimental protocols. Subjects for the disease susceptibility genome screen were part of a sample that was recruited during a routine blood donation from private blood collection centers in San Bernardino and Rancho Mirage, Calif., USA. The staff of the blood collection agencies invited all healthy blood donors to participate, and helped the subjects fill out a consent form and a simple personal data collection form prior to sample collection. The data collection form included information about age, sex, body size, personal and family disease history, and ethnic background of both parents. Information about the identity of the study participants was not recorded. Subjects would be excluded if they failed to meet the blood donation eligibility guidelines established by the American Red Cross. Ethnicity was defined for each subject if they identified both parents as having the same ethnic/geographic background, otherwise they are indicated as “Other”. For the purpose of identifying disease susceptibility associated SNPs, derived from this collection was a discovery cohort consisting of male and female Caucasian-Americans divided into young (18-39 years) and old (>60 years) groups. These groups and others used in this study are shown in Table 4.

TABLE 4
Table 4. Composition of age-, gender-, and ethnicity-stratified
groups. Abbreviations: CA, Caucasian-American; HI, Hispanic-American;
AF, African-American; AS, Asian-American; YF, Young Female;
YM, Young Male; OF, Old Female; OM, Old Male; S.D., Standard
Deviation.

| Group | Gender | N | Age Range | Mean Age (S.D.) | |
|---|---|---|---|---|---|
| CA-YF | Female | 276 | 18-39 | 27.0 | (6.68) |
| CA-YM | Male | 276 | 18-39 | 27.1 | (6.65) |
| CA-OF | Female | 184 | 60-69 | 64.1 | (2.84) |
| CA-OM | Male | 367 | 60-79 | 66.7 | (4.78) |
| HL-YF | Female | 359 | 18-39 | 29.0 | (6.42) |
| HI-YM | Male | 173 | 18-39 | 28.9 | (6.67) |
| HI-OF | Female | 61 | 50-78 | 55.6 | (5.66) |
| HI-OM | Male | 64 | 50-89 | 57.9 | (7.49) |
| AF | Female/Male | 97/97 | 18-76 | 37.4 | (11.49) |
| AS | Female/Male | 62/64 | 18-65 | 34.4 | (12.18) |

[0354] A follow-up study of the SNPs significantly associated with age in the genome scan was carried out in a sample of 417 Caucasian twin pairs from the adult twin registry at St Thomas Hospital, London, United Kingdom. Participants in this collection were enrolled without regard to health status as previously described (Andrew et al., 2001, Twin Res., 4:464-477). For this study, 97 traits were selected to explore possible disease associations. The selected traits have connections to many disease areas, including cardiovascular diseases, diabetes, hypertension, obesity, and osteoporosis.

[0355] Practically a healthy subject, when human, is defined as human donor who passes blood bank criteria to donate blood for eventual use in the general population. These criteria are as follows: free of detectable viral, bacterial, mycoplasma, and parasitic infections; not anemic; and then further selected based upon a questionnaire regarding history. Thus, a healthy population represents an unbiased population of sufficient health to donate blood according to blood bank criteria, and not further selected for any disease state. Typically such individuals are not taking any medications.

[0356] Blood was obtained from a donor by venous puncture and preserved with 1 mM EDTA pH 8.0. Ten milliliters of whole blood from each donor was centrifuged at 2000× g. One milliliter of the buffy coat was added to 9 milliliters of 155 mM NH₄Cl, 10 mM KHCO₃, and 0.1 mM Na₂EDTA, incubated 10 minutes at room temperature and centrifuged for 10 minutes at 2000× g. The supernatant was removed and the white cell pellet was washed in 155 mM NH₄Cl, 10 mM KHCO₃, and 0.1 mM Na₂EDTA and resuspended in 4.5 milliliters of 50 mM Tris, 5 mM EDTA, and 1% SDS. Proteins were precipitated from the cell lysate by 6M ammonium acetate pH 7.3 and separated from the nucleic acid by centrifugation at 3000× g. The nucleic acid was recovered from the supernatant by the addition of an equal volume of 100% isopropanol and centrifugation at 2000× g. The dried nucleic acid pellet was hydrated in 10 mM Tris pH 7.6 and 1 mM Na₂EDTA and stored at 4° C.

Statistical Analysis

[0357] Estimates of allele frequencies derived from pooled DNA were based on independent mass spectrometry measurements of four analyte aliquots derived from a single PCR reaction. The median standard deviation for these values was approximately 0.01. For comparing allele frequencies between the young and old pools, females and males were analyzed separately. The statistic used to test the difference in allele frequencies between pools was of the form:

$$Z = \frac{{\hat{p}}_{y} - {\hat{p}}_{o}}{{( {\hat{p}}_{y} ( 1 - {\hat{p}}_{y} ) / 2 {n}_{y} + ( {\hat{p}}_{o} ) / {2}_{o}^{n} + {ε}_{y}^{2} + {ε}_{o}^{2} )}^{1 / 2}} ,$$

which follows a standard normal distribution. Here \hat{p}_{y} and \hat{p}ₒ are the allele frequency estimates and ε_{y}² and εₒ² are estimates of measurement variability calculated from measurement replicates in the young and old pools, respectively. In this study, no correction was made for additional sources of variation or for multiple testing. Rather, SNPs were identified that had p-values less than 0.05 among all measured SNPs, followed by a second, independent measurement of all significant SNPs based on three separate PCRs of each DNA pool. The results of the second round of measurement were analyzed in a manner similar to the first round, and were compared for consistency. SNPs that showed statistically significant differences between young and old groups from pooled DNA analyses were individually genotyped for final validation.

[0358] Estimates of allele frequencies using individual genotype data were found using the gene counting method. Comparisons of allele frequencies as well as genotype frequencies between groups were carried out using a chi-squared test of independence.

[0359] The SNPs found to be associated with age were further analyzed for association with disease-related quantitative traits in the twin collection. The analysis was conducted using a quantitative transmission-disequilibrium test (QTDT) as described by Abecasis et al., 2000, Am J Hum Genet., 66:279-292 to take advantage of the twin-based sample and to control for admixture and other non-genetic sources of variation. The form of the test was implemented that does not require the estimation of variance components. Formal statistical procedures to account for multiple testing were not use, but the distribution of the resulting p-values is reported.

Results of Genome-Wide SNP Analysis for Morbidity Gene Discovery

[0360] A strategy was pursued that utilizes estimates of allele frequencies in DNA pools to screen large numbers of SNPs. To apply this to disease susceptibility gene discovery, the Caucasian-American individuals were divided by age (under 40 and over 60 years) and by sex (Table 4). The fraction of included subjects reporting any health problem was only 1.8% and 2.9% in young females and males, and 3.8% and 3.5% in old females and males, respectively. In this study, a collection was used of 6,500 exonic SNPs located in approximately 5,000 genes or expressed sequence tag (EST) clusters. The majority of assays for these SNPs, originally identified in an in silico discovery project, were developed in collaboration with the National Cancer Institute (NCI).

Identification of D-AKAP2 as a Candidate Gene

[0361] More than 50 markers were identified out of the 6,500 tested markers that show a reproducibly significant allele frequency change between the two age groups in at least one gender (P<0.05). The SNP that demonstrated the strongest association with age in both genders is located within the D-AKAP2 gene.

[0362] D-AKAP2 codes for dual-specific A-kinase anchor protein 2, which is part of a family of scaffold proteins known as A-kinase anchoring proteins (AKAPs). AKAPs bind the regulatory subunit of cAMP-dependent Protein Kinase (PKA), and target the kinase to various intracellular locations, localizing cAMP-mediated activation of the kinase. PKA is a broad specificity kinase and phosphorylates numerous proteins that function in many essential cellular processes such as metabolism, gene transcription, cell division, and neuronal transmission. In the inactive state, PKA is a tetramer consisting of two catalytic (C) and two regulatory (R) subunits. The dual specificity of D-AKAP2 is defined by its ability to bind both the RI and RII isoforms of PKA.

[0363] An A>G polymorphism in the 3′ untranslated region (3′UTR) of D-AKAP2 showed a significant decrease of about 8% (P<0.01) of the G allele in the older sample of both genders (Table 5). The marker was individually genotyped and the frequency differences between young and old individuals calculated from the genotypes were very similar to the pool results. There was a slight skewing of frequencies in the pools likely resulting from uneven PCR amplification of the two alleles. This led to an underestimation of the G allele frequency in all pools but did not impact the significance of the differences between young and old (Table 5).

TABLE 5
Table 5. Comparison of allele frequencies between young
and old groups. Sample sizes are the same as those of
the corresponding groups in Table 2. Allele frequencies
for each SNP are given for the G allele.

Allelle Frequency

| | | | |
|---|---|---|---|
| Young | Old | Difference | P-Value |

Pool Data
3′ UTR

| | | | | |
|---|---|---|---|---|
| Caucasian Female | 0.322 | 0.240 | 0.082 | 0.007 |
| Caucasian Male | 0.362 | 0.232 | 0.076 | 0.002 |

Genotype Data
3′ UTR

| | | | | |
|---|---|---|---|---|
| Caucasian Female | 0.274 | 0.212 | 0.062 | 0.034 |
| Caucasian Male | 0.304 | 0.232 | 0.072 | 0.004 |

1646V

| | | | | |
|---|---|---|---|---|
| Caucasian Female | 0.402 | 0.318 | 0.084 | 0.009 |
| Causian Male | 0.429 | 0.369 | 0.060 | 0.030 |
| Hispanic Female | 0.445 | 0.316 | 0.129 | 0.008 |
| Hispanic Male | 0.436 | 0.375 | 0.061 | 0.229 |

In10

| | | | | |
|---|---|---|---|---|
| Caucasian Female | 0.877 | 0.871 | 0.006 | 0.147 |
| Caucasian Male | 0.880 | 0.865 | 0.015 | 0.360 |

[0364] To identify common polymorphisms in the D-AKAP2 gene, the 15 exons and 100-200 bp of the flanking sequence were sequences. The analysis of 36 chromosomes revealed only two additional polymorphisms: An A>G SNP in intron 10, six nucleotides downstream from exon 10 (In10), and an A>G SNP in exon 14 (corresponding to AKAP10-5 at nucleotide 2073 of SEQ ID NO:1), leading to an amino acid substitution Ile to Val at position 646 (I646V). Individual genotyping of the Caucasian-American samples showed that the intron 10 SNP exhibits no morbidity-association. The I646V polymorphism, however, was found to be significantly different between young and old in both males (P=0.03) and females (P=0.009) (Table 5). There was no significant difference between young males and females and between old males and females. The Bayesian, coalescent theory-based method (Stephens et al., 2001, Am J Hum Genet. 68:978-989) was applied to construct haplotypes at these three tightly linked sites for each subject. The estimates of the disequilibrium (D′) between the 3′UTR and the I646V and In10 SNPs were 0.991 and 0.255 (r2=0.55 and 0.03), respectively. The distance between the markers in strong disequilibrium, 3′UTR and I646V which both showed association, is about 4 kb, while the intron 10 SNP is located approximately 23 kb upstream of I646V.

[0365] As expected, the changes in genotype frequencies between age groups for the three sites showed a similar level of statistical significance as the changes in allele frequencies. At the 3′UTR and the I646V variable sites, GG homozygotes were reduced and AA homozygotes increased in the older sample population of both genders. This further supports the hypothesis that the G allele, which determines the Val allele at I646V, is associated with a negative health impact.

[0366] Hispanic-American samples were also genotyped for the I646V variation. Since there were only a small number of Hispanic-American individuals over 60 years, the older sample population was extended to all individuals older than 50 years of age (Table 4). While females showed a statistically significant allele frequency difference between old and young (P=0.008), the males did not, which can be due to the relatively small number of male individuals (Table 5). The allele frequency differences in both genders were comparable to those observed in Caucasian-Americans. The frequency of the G allele decreased by 0.129 in females and 0.061 in males, the GG homozygote by 0.087 in females and 0.072 in males. These results further support the association of the Val allele with morbidity and/or mortality, and therefore the involvement of this gene in one or several disease processes. Another non-synonymous D-AKAP2 variation retrieved from dbSNP has been verified. The G-A transversion in exon 4 results in an Arg to His substitution at position 249 (R249H; corresponding to a G to A transversion at nucleotide 883 of SEQ ID NO:1 encoding human D-AKAP2). The Arg was found to be in complete linkage disequilibrium with the Ile at position 646, occurring together in every case, and therefore shows the same age effect.

Association of D-AKAP2 Genotypes with a Cardiac Trait

[0367] In an effort to identify traits correlated with the observed age association of the I646V SNP, we utilized a cohort of 417 fasting Caucasian twin pairs with extensive coverage for a variety of disease-related traits. Of the 97 traits analyzed, only the PR interval was statistically significant at a nominal level of 0.05. The estimate from the QTDT model of the average effect of the G allele (Val) was to decrease the PR interval 6.3 units (P=0.007). The genotype means in the subset of 207 informative twin pairs were 157±23.4, 152 ±26.9, and 146±25.4 (mean ± standard deviation) for genotypes AA, GA, and GG, respectively at a position corresponding to nucleotide 2073 of SEQ ID NO:1.

### Example 2

Detection of AKAP10-1 by MassEXTEND™ Assay Detection Methods

[0368] AKAP10-1 is an allele of the AKAP10 gene with a single nucleotide polymorphism at nucleotide number 156277 (based on the sequence of a genomic clone of the AKAP10 gene, GenBank Accession No. AC005730). The single nucleotide polymorphism is a T to C transversion located in the 3′non-translated region of the gene encoding AKAP10. PCR primers were synthesized by OPERON (Alameda, Calif.) using phosphoramidite chemistry. Amplification of the AKAP10 target sequence was carried out in single 50 μl PCR reaction with 25 ng of human genomic DNA obtained from samples as described in Example 1. Each reaction containing IX PCR buffer (Qiagen, Valencia, Calif.), 200 μM dNTPs, 1 U Hotstar Taq polymerase (Qiagen, Valencia, Calif.), 4 mM MgCl₂, and 25 pmols of the forward primer containing the universal primer sequence and the target specific sequence 5′-TCTCAATCATGTGCATTGAGG-3′ (SEQ ID NO: 5) 2 pmoles of the reverse primer 5′-AGCGGATAACAATTTCACACAGGGATCACACAGCCATCAGCAG-3′ (SEQ ID NO: 6) and 10 pmoles of a biotinylated universal primer complementary to the 5′ end of the PCR amplicon 5′-AGCGGATAACAATTTCACACAGG-3′ (SEQ ID NO: 7). Alternatively, the biotinylated universal primer could be 5′-GGCGCACGCCTCCACG-3′ (SEQ ID NO: 16). After an initial round of amplification of the target with the specific forward and reverse primer, the 5′ biotinylated universal primer was hybridized and acted as a reverse primer thereby introducing a 3′ biotin capture moiety into the molecule. The amplification protocol resulted in a 5′-biotinylated double stranded DNA amplicon, which dramatically reduces the cost of high throughput genotyping by eliminating the need to 5′ biotin label each forward primer used in a genotyping. Thermal cycling was performed in 0.2 mL tubes or 96 well plate using an MJ Research Thermal Cycler (Waltham, Mass.) (calculated temperature) with the following cycling parameters: 94° C. for 5 min; 45 cycles: 94° C. for 20 sec, 56° C. for 30 sec, 72° C. for 60 sec; 72° C. 3 min.

Immobilization of DNA

[0369] The 50 μl PCR reaction was added to 25 μl of streptavidin coated magnetic bead (Dynal) prewashed three times and resuspended in 1M NH₄Cl, 0.06M NH₄OH. The PCR amplicons were allowed to bind to the beads for 15 minutes at room temperature. The beads were then collected with a magnet and the supernatant containing unbound DNA was removed. The unbound strand was release from the double stranded amplicons by incubation in 100 mM NaOH and washing of the beads three times with 10 mM Tris pH 8.0.

Genotyping

[0370] Genotyping was carried out using the MassEXTEND™ assay and MALDI-TOF. The SNP identified at position 156277 of AKAP10 in the GenBank sequence is represented as a T to C transversion. The MassEXTEND™ assay detected the sequence of the complementary strand at the polymorphic position, thus the primer extension product incorporated either a T or a C. The DNA coated magnetic beads were resuspended in 26 mM Tris-HCL pH 9.5, 6.5 mM MgCl₂ and 50 mM each of dTTPs and 50 mM each of ddCTP, ddATP, ddGTP, 2.5 U of a thermostable DNA polymerase (Amersham Pharmacia Biotech, Piscataway, N.J.) and 20 pmoles of a template specific oligonucleotide primer 5′-CTGGCGCCCACGTGGTCAA-3′ (SEQ ID NO: 8) (Operon, Alameda, Calif.). Primer extension occurs with three cycles of oligonucleotide primer was hybridization and extension. The extension products were analyzed after denaturation from the template with 50 mM NH₄Cl and transfer of 150 nl each sample to a silicon chip preloaded with 150 nl of H3PA (3-hydroxy picolinic acid) (Sigma Aldrich, St. Louis, Mo.) matrix material. The sample material was allowed to crystallize and analyzed by MALDI-TOF (Bruker Daltonics, Billerica, Mass., PerSeptive, Foster City, Calif.). The mass of the primer used in the MassEXTEND™ reaction was 5500.6 daltons. The allelic variant results in the addition of ddC to the primer to produce an extension product having a mass of 5773.8 daltons. The predominant allele is extended by the addition of dT and ddG to the primer to produce an extension product having a mass of 6101 daltons.

[0371] The SNP that is present in AKAP10-1 is a T to C transversion at nucleotide number 156277 of the sequence of a genomic clone of the AKAP10 gene (GenBank Accession No. AC005730) (SEQ ID NO: 17). SEQ ID NO:17 represents the nucleotide sequence of human chromosome 17, which contains the genomic nucleotide sequence of the human AKAP10 gene at approximately nucleotide 83,580 to nucleotide 156,577. SEQ ID NO: 18 represents the nucleotide sequence of human chromosome 17, which contains the genomic nucleotide sequence of the human AKAP10-1 allele.

[0372] The frequency of the AKAP10-1 allelic variant was measured in a population of age selected healthy individuals. Five hundred fifty-two (552) individuals between the ages of 18-39 years (276 females, 276 males) and 552 individuals between the ages of 60-79 (184 females between the ages of 60-69, 368 males between the age of 60-79) were tested for the presence of the allelic variant localized in the non-translated 3′ region of AKAP 10. Differences in the frequency of this variant with increasing age groups were observed among healthy individuals. Statistical analysis showed that the significance level for differences in the allelic frequency for alleles between the “younger” and the “older” populations was p=0.0009 and for genotypes was p=0.003. Differences between age groups are significant. For the total population allele significance is p=0.0009, and genotype significance is p=0.003.

[0373] The young and old populations were in Hardy-Weinberg equilibrium. A preferential change of one particular genotype was not seen.

[0374] The polymorphism is localized in the non-translated 3′-region of the gene encoding the human protein kinase A anchoring protein (AKAP10). The gene is located on chromosome 17. Its structure includes 15 exons and 14 intervening sequences (introns). The encoded protein is responsible for the sub-cellular localization of the cAMP-dependent protein kinase and, therefore, plays a key role in the G-protein mediated receptor-signaling pathway (Huang et al. PNAS (1007) 94:11184-11189). Since its localization is outside the coding region, this polymorphism is most likely in linkage disequilibrium (LD) with other non-synonymous polymorphisms that could cause amino acid substitutions and subsequently alter the function of the protein.

### Example 3

Discovery of AKAP10-5 Allele

[0375] Genomic DNA was isolated from blood (see Example 1) of seventeen (17) individuals with a genotype CC at the AKAP10-1 gene locus and a single heterozygous individual (CT) (as described in Example 2). A target sequence in the AKAP10-1 gene which encodes the C-terminal PKA binding domain was amplified using the polymerase chain reaction. PCR primers were synthesized by OPERON (Alameda, Calif.) using phosphoramidite chemistry. Amplification of the AKAP10-1 target sequence was carried out in individual 50 μl PCR reaction with 25 ng of human genomic DNA templates. Each reaction containing I X PCR buffer (Qiagen, Valencia, Calif.), 200 μM dNTPs, IU Hotstar Taq polymerase (Qiagen, Valencia, Calif.), 4 mM MgCl₂, and 25 pmols of the forward primer containing the universal primer sequence and the target specific sequence 5′-TCC CAA AGT GCT GGA ATT AC-3′ (SEQ ID NO: 9), 2 pmoles of the reverse primer 5′-GTC CAA TAT ATG CAA ACA GTT G-3′(SEQ ID NO:10). Thermal cycling was performed in 0.2 mL tubes or 96 well plate using an MJ Research Thermal Cycler (MJ Research, Waltham, Mass.) (calculated temperature) with the following cycling parameters: 94° C. for 5 min; 45 cycles; 94° C. for 20 sec, 56° C. for 30 sec, 72° C. for 60 sec; 72° C. 3 min. After amplification the amplicons were purified by chromatography (Mo Bio Laboratories (Solana Beach, Calif.).

[0376] The sequence of the 18 amplicons, representing the target region, was determined using a standard Sanger cycle sequencing method with 25 nmoles of the PCR amplicon, 3.2 μM DNA sequencing primer 5′-CCC ACA GCA GTT AAT CCT TC-3′ (SEQ ID NO:11) and chain terminating dRhodamine labeled 2′, 3′ dideoxynucleotides (PE Biosystems, Foster City, Calif.) using the following cycling parameters: 96° C. for 15 sec, 25 cycles: 55° C. for 15 sec, 60° C. for 4 min. The sequencing products were precipitated by 0.3M NaOAc and ethanol, the precipitate was centrifuged and dried. The pellets were resuspended in deionized formamide and separated on a on a 5% polyacrylamide gel. The sequence was determined using the “Sequencher” software (Gene Codes, Ann Arbor, Mich.).

[0377] The sequence of all 17 of the amplicons which are homozygous for the AKAP10-1 SNP revealed a polymorphism at nucleotide position 152171 (numbering for GenBank Accession No. AC005730 for AKAP10 genomic clone) with A replaced by G. This SNP can also be designated as located at nucleotide 2073 of a cDNA clone of the wildtype AKAP10 (SEQ ID NO:1) (GenBank Accession No. AF037439). This single nucleotide polymorphism was designated as AKAP10-5 (SEQ ID NO:3) and results in a substitution of a valine for an isoleucine residue at amino acid position 646 (SEQ ID NO:4).

### Example 4

PCR Amplification and MassEXTEND™ Assay Detection of AKAP10-5 in a Healthy Donor Population

[0378] A healthy population stratified by age is a very efficient and a universal screening tool for morbidity associated genes by allowing for the detection of changes of allelic frequencies in the young compared to the old population. Individual samples of this healthy population base can be pooled to further increase the throughput.

[0379] Healthy samples were obtained through the blood bank of San Bernardino, Calif. Both parents of the blood donors were of Caucasian origin. Practically a healthy subject, when human, is defined as human donor who passes blood bank criteria to donate blood for eventual use in the general population. These criteria are as follows: free of detectable viral, bacterial, mycoplasma, and parasitic infections; not anemic; and then further selected based upon a questionnaire regarding history. Thus, a healthy population represents an unbiased population of sufficient health to donate blood according to blood bank criteria, and not further selected for any disease state. Typically such individuals are not taking any medications.

[0380] PCR primers were synthesized by OPERON (Alameda, Calif.) using phosphoramidite chemistry. Amplification of the AKAP10 target sequence was carried out in single 50 μl PCR reaction with 100 ng-1 ug of pooled human genomic DNAs in a 50 μl PCR reaction. Individual DNA concentrations within the pooled samples were present in equal concentration with the final concentration ranging from 1-25ng. Each reaction contained 1× PCR buffer (Qiagen, Valencia, Calif.), 200 μM dNTPs, 1 U Hotstar Taq polymerase (Qiagen, Valencia, Calif.), 4 mM MgCl₂, and 25 pmols of the forward primer containing the universal primer sequence and the target specific sequence 5′-AGCGGATAACAATTTCACACAGGGAGCTAGCTTGGAAGATTGC-3′ (SEQ ID NO:12), 2 pmoles of the reverse primer 5′-GTCCAATATATGCAAACAGTTG-3′ (SEQ ID NO: 10) and 10 pmoles of a biotinylated universal primer complementary to the 5′ end of the PCR amplicon BIO:5′-AGCGGATAACAATTTCACACAGG-3′ (SEQ ID NO: 7). After an initial round of amplification with the target with the specific forward and reverse primer, the 5′ biotinylated universal primer can then hybridized and acted as a forward primer thereby introducing a 5′ biotin capture moiety into the molecule. The amplification protocol resulted in a 5′-biotinylated double stranded DNA amplicon and dramatically reduces the cost of high throughput genotyping by eliminating the need to 5′ biotin label every forward primer used in a genotyping.

[0381] Thermal cycling was performed in 0.2 mL tubes or 96 well plate using an MJ Research Thermal Cycler (Waltham, Mass.) (calculated temperature) with the following cycling parameters: 94° C. for 5 min; 45 cycles: 94° C. for 20 sec, 56° C. for 30 sec; 72° C. for 60 sec; 72° C. 3 min.

Immobilization of DNA

[0382] The 50 μl PCR reaction was added to 25 μl of streptavidin coated magnetic beads (Dynal, Oslo, Norway) (Lake Success, N.Y.), which were prewashed three times and resuspended in 1M NH₄Cl, 0.06M NH₄OH. The 5′ end of one strand of the double stranded PCR amplicons were allowed to bind to the beads for 15 minutes at room temperature. The beads were then collected with a magnet and the supernatant containing unbound DNA was removed. The hybridized but unbound strand was released from the double stranded amplicons by incubation in 100 mM NaOH and washing of the beads three times with 10 mM Tris pH 8.0.

Genotyping

[0383] The identity of the nucleotide present at the polymorphic site of AKAP 10-5 was determined by using the MassEXTEND™ assay and MALDI-TOF (see, U.S. Pat. No. 6,043,031). The MassEXTEND™ assay is a primer extension assay that utilizes a primer that hybridizes adjacent to the polymorphic region and which is extended in the presence of one or more ddNTPs. Extension is stopped by the incorporation of a dideoxy nucleotide. At a polymorphic site the different alleles produce different length extension products, which are distinguishable by mass spectrometry.

[0384] The MassEXTEND™ assay detected the sequence of the sense strand and resulted in the incorporation of either T or C into the extension product. The DNA coated magnetic beads were suspended in 26 mM Tris-HCL pH 9.5; 6.5 mM, MgCl₂ and 50 mM each of dTTPs and 50 mM each of ddCTP, ddATP, ddGTP, 2.5 U of a thermostable DNA polymerase (Amersham Pharmacia Biotech, Piscataway N.J.) and 20 pmoles of a template specific oligonucleotide primer 5′-ACTGAGCCTGCTGCATAA-3′ (SEQ ID NO:15) (Operon) (Alameda, Calif.). Primer extension occurs with three cycles of oligonucleotide primer hybridization and extension. The extension products were analyzed after denaturation from the template with 50 mM NH₄Cl and transfer of 150 nl each sample to a silicon chip preloaded with 150 nl of H3PA (3-hydroxy picolinic acid) (Sigma Aldrich, St. Louis, Mo.) matrix material. The sample material was allowed to crystallize and analyzed by MALDI-TOF (Bruker Daltonics, Billerica, Mass., PerSeptive, Foster City, Calif.). The primer had a mass of 5483.6 daltons. The allelic variant resulted in the addition of a ddC to the primer to produce an extension product having a mass of 5756.8 daltons. The predominant allele resulted in the addition a T and ddG to the primer giving an extension product with a mass of 6101 daltons.

### Example 5

Discovery of AKAP10-7

[0385] Genomic DNA isolation, amplification of the target regions and sequencing of amplicons was carried out as in Example 3. Using the sequence of the cDNA for AKAP10, chromosome 17 was BLAST searched to identify the number of exons. Sanger sequencing of the regions around and containing the exons was performed and resulted in the discovery of AKAP10-7 polymorphic region. For AKAP10-7 the forward sequencing primer was CACTGCACCCAGCCTTATG (SEQ ID NO: 23) and the reverse sequencing primer was CTGGGATGTGAAGGAAAGGA (SEQ ID NO: 24).

### Example 6

MassEXTEND™ Assay Detection of AKAP10-7

[0386] Samples are obtained and amplified as in Example 4.

[0387] The identity of the nucleotide present at the polymorphic site of AKAP 10-7 is determined by using the MassEXTEND™ assay and MALDI-TOF (see, U.S. Pat. No. 6,043,031). The MassEXTEND™ assay detects the sequence of the complementary strand and resulted in the incorporation of either G or A into the extension product. Reactions are carried out as in Example 4. The template specific oligonucleotide primer 5′-CTCTGCGTCTCAGGTATT-3′ (SEQ ID NO: 20). (Operon, Alameda, Calif.). The primer has a mass of 5456.6 daltons. The allelic variant results in the addition of a ddA to the primer to produce an extension product having a mass of 5753.6 daltons. The predominant allele results in the addition a G and ddA to the primer giving an extension product with a mass of 6083.0 daltons.

[0388] Since modifications will be apparent to those of skill in this art, it is intended that this invention be limited only by the scope of the appended claims.

1. A method for indicating increased susceptibility of a subject to a disease or disorder, comprising:
conducting an EKG examination;
determining the EKG-PR-interval in the subject, wherein, if the EKG-PR-interval is decreased, then
determining the amino acid present in the subject at position 646 of AKAP10/D-AKAP2 (SEQ ID NO:2) or the nucleotide present at position corresponding to nucleotide 2073 of SEQ ID NO: 1, wherein the presence of Val at position 646 of SEQ ID NO:2 or the presence of a -G- at nucleotide position 2073 of SEQ ID NO: 1, indicates increased susceptibility to a disease or disorder.

2. The method of claim 1, wherein the disease or disorder is selected from the group consisting of cardiovascular disorders, cardiac disease, proliferative disorders, neurological disorders, neurodegenerative disorders, obesity, diabetes and peripheral retinopathies.

3. The method of claim 1, wherein the EKG-PR-interval in the subject is compared to a predetermined age-matched standard EKG-PR-interval.

4. The method of claim 3, wherein the predetermined standard EKG-PR-interval is obtained from a known age-matched control group that is homozygous -AA- at a position corresponding to nucleotide 2073 of SEQ ID NO: 1 or homozygous Ile/Ile at a position corresponding to position 646 of SEQ ID NO:2.

5. The method of claim 3, wherein the predetermined standard EKG-PR-interval is obtained from a known age-matched control group that is heterozygous -GA- at a position corresponding to nucleotide 2073 of SEQ ID NO:1 or heterozygous Val/Ile at a position corresponding to position 646 of SEQ ID NO:2.

6. The method of claim 3, wherein the predetermined standard EKG-PR-interval is obtained from a known age-matched control group that is selected from either homozygous -AA- at a position corresponding to nucleotide 2073 of SEQ ID NO:1 or homozygous Ile/Ile at a position corresponding to position 646 of SEQ ID NO:2; or heterozygous -GA- at a position corresponding to nucleotide 2073 of SEQ ID NO:1 or heterozygous Val/Ile at a position corresponding to position 646 of SEQ ID NO:2.

7. The method of claim 3, wherein the predetermined standard EKG-PR-interval is obtained from a control age-matched subject without heart disease.

8. A method for indicating increased susceptibility of a subject to a disease or disorder associated with the cardiovascular system, comprising:
conducting an EKG exam;
determining the EKG-PR-interval in the subject, wherein, if the EKG-PR-interval is decreased, then
determining the amino acid present at position 646 of AKAP10/D-AKAP2 (SEQ ID NO:2) or the nucleotide present at position corresponding to nucleotide 2073 of SEQ ID NO:1, wherein the presence of Val at position 646 of SEQ ID NO:2 or the presence of a -G- at nucleotide position 2073 of SEQ ID NO:1, indicates increased susceptibility to a disease or disorder associated with the cardiovascular system.

9. The method of claim 8, wherein the EKG-PR-interval in the subject is compared to a predetermined age-matched standard EKG-PR-interval.

10. The method of claim 9, wherein the predetermined standard EKG-PR-interval is obtained from a known age-matched control that is homozygous -AA- at a position corresponding to nucleotide 2073 of SEQ ID NO:1 or homozygous Ile/Ile at a position corresponding to position 646 of SEQ ID NO:2.

11. The method of claim 9, wherein the predetermined standard EKG-PR-interval is obtained from a known age-matched control group that is heterozygous -GA- at a position corresponding to nucleotide 2073 of SEQ ID NO: 1 or heterozygous Val/Ile at a position corresponding to position 646 of SEQ ID NO:2.

12. The method of claim 9, wherein the predetermined standard EKG-PR-interval is obtained from a known age-matched control group that is selected from either homozygous -AA- at a position corresponding to nucleotide 2073 of SEQ ID NO: 1 or homozygous Ile/Ile at a position corresponding to position 646 of SEQ ID NO:2; or heterozygous -GA- at a position corresponding to nucleotide 2073 of SEQ ID NO: 1 or heterozygous Val/Ile at a position corresponding to position 646 of SEQ ID NO:2.

13. The method of claim 9, wherein the predetermined standard EKG-PR-interval is obtained from a control age-matched subject without heart disease.

14-23. (canceled)

24. The method of claim 1, wherein the disease or disorder is selected from one or more of the group consisting of: cardiac arrhythmia, brachycardia, atrial fibrillation, sick sinus syndrome, sudden cardiac arrest, ventricular arrhythmia, ventricular fibrillation, ventricular tachycardia, Wolf-Parkinson-White (WPW) Syndrome, Lown-Ganong-Levin (LGL) Syndrome, hypertension.

25. The method of claim 1, further comprising monitoring the subject for cardiovascular disease.

26. The method of claim 1, further comprising administering to the subject prophylactic steps.

27-29. (canceled)

30. A method for determining responsiveness of a subject to one or more β-blocking agents, comprising:
detecting for the subject the presence or absence of Val at position 646 of SEQ ID NO:2 or a -G- nucleotide at a position corresponding to position 2073 of SEQ ID NO: 1, wherein the presence of a Val at position 646 of SEQ ID NO:2 or a -G- at nucleotide 2073 of SEQ ID NO: 1, is indicative of an increased likelihood that a subject has a modulated response to one or more β-blocking agents compared to a subject who does not have the allelic variant.

31. The method of claim 30, wherein the modulated response is a decreased response to one or more β-blocking agents compared to a subject who does not have the allelic variant.

32. The method of claim 31, wherein the decreased response is a non-response to one or more β-blocking agents compared to a subject who does not have the allelic variant.

33. The method of claim 30, wherein the modulated response is an increased response to one or more β-blocking agents compared to a subject who does not have the allelic variant.

34. The method of claim 30, wherein at least one β-blocking agent is an antagonist of a β-adrenergic receptor.

35. The method of claim 30, wherein at least one β-blocking agent is an agonist of a β-adrenergic receptor.

36. A method for determining responsiveness of a subject to one or more β-blocking agents, comprising:
detecting the presence or absence of Val at position 646 of SEQ ID NO:2 or a -G- nucleotide at a position corresponding to position 2073 of SEQ ID NO: 1, wherein the presence of a Val at position 646 of SEQ ID NO:2 or a -G- at nucleotide 2073 of SEQ ID NO:1, is indicative of an increased likelihood that a subject has an increased response to one or more β-blocking agents compared to a subject who does not have the allelic variant.

37. The method of claim 36, wherein at least one β-blocking agent is an antagonist of a β-adrenergic receptor.

38. The method of claim 36, wherein at least one β-blocking agent is an agonist of a β-adrenergic receptor.

39. A method for determining responsiveness of a subject to one or more β-blocking agents, comprising:
detecting for the subject the presence or absence of Val at position 646 of SEQ ID NO:2 or a -G- nucleotide at a position corresponding to position 2073 of SEQ ID NO: 1, wherein the presence of a Val at position 646 of SEQ ID NO:2 or a -G- at nucleotide 2073 of SEQ ID NO:1, is indicative of an increased likelihood that a subject is non-responsive to one or more β-blocking agents compared to a subject who does not have the allelic variant.

40. The method of claim 39, wherein at least one β-blocking agent is an antagonist of a β-adrenergic receptor.

41. The method of claim 39, wherein at least one β-blocking agent is an agonist of a β-adrenergic receptor.

42. A method for determining responsiveness of a subject to one or more β-blocking agents, comprising:
detecting the presence or absence of Val at position 646 of SEQ ID NO:2 or a -G- nucleotide at a position corresponding to position 2073 of SEQ ID NO: 1, wherein the presence of a Val at position 646 of SEQ ID NO:2 or a -G- at nucleotide 2073 of SEQ ID NO:1, is indicative of an increased likelihood that a subject is hyper-responsive to one or more β-blocking agents compared to a subject who does not have the allelic variant.

43. The method of claim 42, wherein the β-blockers is an antagonist of a β-adrenergic receptor.

44. The method of claim 42, wherein the β-blockers is an agonist of a β-adrenergic receptor.

45. A method for indicating susceptibility to morbidity, increased or early mortality, or morbidity and increased or early mortality of a subject; comprising:
conducting an EKG exam;
determining the EKG-PR-interval in the subject, wherein if the EKG-PR-interval is decreased; then
determining the amino acid at position 646 of AKAP10/D-AKAP2 (SEQ ID NO:2) or the nucleotide present at position corresponding to nucleotide 2073 of SEQ ID NO:1, wherein the presence of Val at position 646 of SEQ ID NO:2 or the presence of a -G- at nucleotide position 2073 of SEQ ID NO:1, indicates increased susceptibility to morbidity, increased or early mortality, or morbidity and increased or early mortality of a subject.

46. The method of claim 45, wherein the EKG-PR-interval in the subject is compared to a predetermined standard EKG-PR-interval.

47. The method of claim 46, wherein the predetermined standard EKG-PR-interval is obtained from a known age-matched control that is homozygous -AA- at a position corresponding to nucleotide 2073 of SEQ ID NO: 1 or homozygous Ile/Ile at a position corresponding to position 646 of SEQ ID NO:2.

48. (canceled)

49. The method of claim 1, wherein the amino acid or nucleotide determining step comprises mass spectrometry.

50. The method of claim 1, wherein the amino acid or nucleotide determining step is effected by detecting a signal moiety selected from the group consisting of radioisotopes, enzymes, antigens, antibodies, spectrophotometric reagents, chemiluminescent reagents, fluorescent reagents and other light producing reagents.

51. The method of claim 1, wherein the subject is heterozygous -GA- at a position corresponding to nucleotide 2073 of SEQ ID NO:1 or heterozygous Val/Ile at a position corresponding to position 646 of SEQ ID NO:2.

52. The method of claim 1, wherein the subject is homozygous -GG- at a position corresponding to nucleotide 2073 of SEQ ID NO:1 or homozygous Val/Val at a position corresponding to position 646 of SEQ ID NO:2.

53. A method for indicating increased susceptibility of a subject to a disease or disorder, comprising:
in a subject determined to have a decreased EKG-PR-interval, determining the amino acid present at position 646 of AKAP10/D-AKAP2 (SEQ ID NO:2) or the nucleotide present at position corresponding to nucleotide 2073 of SEQ ID NO: 1, wherein the presence of Val at position 646 of SEQ ID NO:2 or the presence of a -G- at nucleotide position 2073 of SEQ ID NO:1, indicates increased susceptibility to a disease or disorder.

54-58. (canceled)

59. A kit, comprising the combination of claim 57, further containing one or more components selected from the group consisting of a reagent for detecting a primer or probe that specifically hybridizes adjacent to or at a polymorphic region spanning a position corresponding to position 883 of SEQ ID NO 1 or 3, and a reagent for amplifying a primer specifically hybridizes adjacent to or at a polymorphic region spanning a position corresponding to position 883 of SEQ ID NO 1 or 3.

60. A method for indicating increased susceptibility of a subject to a disease or disorder, comprising:
conducting an EKG examination;
determining the EKG-PR-interval in the subject, wherein, if the EKG-PR-interval is decreased, then
determining the amino acid present in the subject at position 249 of AKAP10/D-AKAP2 (SEQ ID NO:2) or the nucleotide present at position corresponding to nucleotide 883 of SEQ ID NO: 1, wherein the presence of His at position 249 of SEQ ID NO:2 or the presence of a -A- at nucleotide position 883 of SEQ ID NO:1, indicates increased susceptibility to a disease or disorder.

61. A method for determining responsiveness of a subject to one or more β-blocking agents, comprising:
detecting for the subject the presence or absence of His at position 249 of SEQ ID NO:2 or a -A- nucleotide at a position corresponding to position 883 of SEQ ID NO: 1, wherein the presence of a His at position 249 of SEQ ID NO:2 or a -A- at nucleotide 883 of SEQ ID NO:1, is indicative of an increased likelihood that a subject has a modulated response to one or more β-blocking agents compared to a subject who does not have the allelic variant.

62. The method of claim 60, wherein the disease or disorder is selected from the group consisting of cardiovascular disorders, cardiac disease, proliferative disorders, neurological disorders, neurodegenerative disorders, obesity, diabetes and peripheral retinopathies.

The application's sequence listing, which the Patent Office published only in electronic form, follows.

SEQUENCE LISTING (26 sequences)

SEQ ID NO: 1 - DNA, 2363 bp, Homo sapiens
  CDS (138)...(2123): Wild Type AKAP-10
  ref <308>: DATABASE ACCESSION NUMBER: GenBank AF037439
  ref <309>: DATABASE ENTRY DATE: 1997-12-21
gcggcttgttgataatatggcggctggagctgcctgggcatcccgaggaggcggtggggcccactcccggaagaagggtcccttttcgcgctagtgcagcggcccctctggacccggaagtccgggccggttgctgaatgaggggagccgggccctccccgcgccagtccccccgcaccctccgtcccgacccgggccccgccatgtccttcttccggcggaaagtgaaaggcaaagaacaagagaagacctcagatgtgaagtccattaaagcttcaatatccgtacattccccacaaaaaagcactaaaaatcatgccttgctggaggctgcaggaccaagtcatgttgcaatcaatgccatttctgccaacatggactccttttcaagtagcaggacagccacacttaagaagcagccaagccacatggaggctgctcattttggtgacctgggcagatcttgtctggactaccagactcaagagaccaaatcaagcctttctaagacccttgaacaagtcttgcacgacactattgtcctcccttacttcattcaattcatggaacttcggcgaatggagcatttggtgaaattttggttagaggctgaaagttttcattcaacaacttggtcgcgaataagagcacacagtctaaacacaatgaagcagagctcactggctgagcctgtctctccatctaaaaagcatgaaactacagcgtcttttttaactgattctcttgataagagattggaggattctggctcagcacagttgtttatgactcattcagaaggaattgacctgaataatagaactaacagcactcagaatcacttgctgctttcccaggaatgtgacagtgcccattctctccgtcttgaaatggccagagcaggaactcaccaagtttccatggaaacccaagaatcttcctctacacttacagtagccagtagaaatagtcccgcttctccactaaaagaattgtcaggaaaactaatgaaaagtatagaacaagatgcagtgaatacttttaccaaatatatatctccagatgctgctaaaccaataccaattacagaagcaatgagaaatgacatcatagcaaggatttgtggagaagatggacaggtggatcccaactgtttcgttttggcacagtccatagtctttagtgcaatggagcaagagcactttagtgagtttctgcgaagtcaccatttctgtaaataccagattgaagtgctgaccagtggaactgtttacctggctgacattctcttctgtgagtcagccctcttttatttctctgagtacatggaaaaagaggatgcagtgaatatcttacaattctggttggcagcagataacttccagtctcagcttgctgccaaaaaggggcaatatgatggacaggaggcacagaatgatgccatgattttatatgacaagtacttctccctccaagccacacatcctcttggatttgatgatgttgtacgattagaaattgaatccaatatctgcagggaaggtgggccactccccaactgtttcacaactccattacgtcaggcctggacaaccatggagaaggtctttttgcctggctttctgtccagcaatctttattataaatatttgaatgatctcatccattcggttcgaggagatgaatttctgggcgggaacgtgtcgccgactgctcctggctctgttggccctcctgatgagtctcacccagggagttctgacagctctgcgtctcagtccagtgtgaaaaaagccagtattaaaatactgaaaaattttgatgaagcgataattgtggatgcggcaagtctggatccagaatctttatatcaacggacatatgccgggaagatgacatttggaagagtgagtgacttggggcaattcatccgggaatctgagcctgaacctgatgtaaggaaatcaaaaggatccatgttctcacaagctatgaagaaatgggtgcaaggaaatactgatgaggcccaggaagagctagcttggaagattgctaaaatgatagtcagtgacattatgcagcaggctcagtatgatcaaccgttagagaaatctacaaagttatgactcaaaacttgagataaaggaaatctgcttgtgaaaaataagagaacttttttcccttggttggattcttcaacacagccaatgaaaacagcactatatttctgatctgtcactgttgtttccagggagagaatggggagacaatcctaggacttccaccctaatgcagttacctgtagggcataattggatggcacatgatgtttcacacagtgaggagtctttaaaggttaccaa

SEQ ID NO: 2 - protein, 662 aa, Homo sapiens
MRGAGPSPRQSPRTLRPDPGPAMSFFRRKVKGKEQEKTSDVKSIKASISVHSPQKSTKNHALLEAAGPSHVAINAISANMDSFSSSRTATLKKQPSHMEAAHFGDLGRSCLDYQTQETKSSLSKTLEQVLHDTIVLPYFIQFMELRRMEHLVKFWLEAESFHSTTWSRIRAHSLNTMKQSSLAEPVSPSKKHETTASFLTDSLDKRLEDSGSAQLFMTHSEGIDLNNRTNSTQNHLLLSQECDSAHSLRLEMARAGTHQVSMETQESSSTLTVASRNSPASPLKELSGKLMKSIEQDAVNTFTKYISPDAAKPIPITEAMRNDIIARICGEDGQVDPNCFVLAQSIVFSAMEQEHFSEFLRSHHFCKYQIEVLTSGTVYLADILFCESALFYFSEYMEKEDAVNILQFWLAADNFQSQLAAKKGQYDGQEAQNDAMILYDKYFSLQATHPLGFDDVVRLEIESNICREGGPLPNCFTTPLRQAWTTMEKVFLPGFLSSNLYYKYLNDLIHSVRGDEFLGGNVSPTAPGSVGPPDESHPGSSDSSASQSSVKKASIKILKNFDEAIIVDAASLDPESLYQRTYAGKMTFGRVSDLGQFIRESEPEPDVRKSKGSMFSQAMKKWVQGNTDEAQEELAWKIAKMIVSDIMQQAQYDQPLEKSTKL

SEQ ID NO: 3 - DNA, 2363 bp, Homo sapiens
  CDS (138)...(2123): AKAP-10-5
  allele 2073: Single Nucleotide Polymorphism: A to G
gcggcttgttgataatatggcggctggagctgcctgggcatcccgaggaggcggtggggcccactcccggaagaagggtcccttttcgcgctagtgcagcggcccctctggacccggaagtccgggccggttgctgaatgaggggagccgggccctccccgcgccagtccccccgcaccctccgtcccgacccgggccccgccatgtccttcttccggcggaaagtgaaaggcaaagaacaagagaagacctcagatgtgaagtccattaaagcttcaatatccgtacattccccacaaaaaagcactaaaaatcatgccttgctggaggctgcaggaccaagtcatgttgcaatcaatgccatttctgccaacatggactccttttcaagtagcaggacagccacacttaagaagcagccaagccacatggaggctgctcattttggtgacctgggcagatcttgtctggactaccagactcaagagaccaaatcaagcctttctaagacccttgaacaagtcttgcacgacactattgtcctcccttacttcattcaattcatggaacttcggcgaatggagcatttggtgaaattttggttagaggctgaaagttttcattcaacaacttggtcgcgaataagagcacacagtctaaacacaatgaagcagagctcactggctgagcctgtctctccatctaaaaagcatgaaactacagcgtcttttttaactgattctcttgataagagattggaggattctggctcagcacagttgtttatgactcattcagaaggaattgacctgaataatagaactaacagcactcagaatcacttgctgctttcccaggaatgtgacagtgcccattctctccgtcttgaaatggccagagcaggaactcaccaagtttccatggaaacccaagaatcttcctctacacttacagtagccagtagaaatagtcccgcttctccactaaaagaattgtcaggaaaactaatgaaaagtatagaacaagatgcagtgaatacttttaccaaatatatatctccagatgctgctaaaccaataccaattacagaagcaatgagaaatgacatcatagcaaggatttgtggagaagatggacaggtggatcccaactgtttcgttttggcacagtccatagtctttagtgcaatggagcaagagcactttagtgagtttctgcgaagtcaccatttctgtaaataccagattgaagtgctgaccagtggaactgtttacctggctgacattctcttctgtgagtcagccctcttttatttctctgagtacatggaaaaagaggatgcagtgaatatcttacaattctggttggcagcagataacttccagtctcagcttgctgccaaaaaggggcaatatgatggacaggaggcacagaatgatgccatgattttatatgacaagtacttctccctccaagccacacatcctcttggatttgatgatgttgtacgattagaaattgaatccaatatctgcagggaaggtgggccactccccaactgtttcacaactccattacgtcaggcctggacaaccatggagaaggtctttttgcctggctttctgtccagcaatctttattataaatatttgaatgatctcatccattcggttcgaggagatgaatttctgggcgggaacgtgtcgccgactgctcctggctctgttggccctcctgatgagtctcacccagggagttctgacagctctgcgtctcagtccagtgtgaaaaaagccagtattaaaatactgaaaaattttgatgaagcgataattgtggatgcggcaagtctggatccagaatctttatatcaacggacatatgccgggaagatgacatttggaagagtgagtgacttggggcaattcatccgggaatctgagcctgaacctgatgtaaggaaatcaaaaggatccatgttctcacaagctatgaagaaatgggtgcaaggaaatactgatgaggcccaggaagagctagcttggaagattgctaaaatgatagtcagtgacgttatgcagcaggctcagtatgatcaaccgttagagaaatctacaaagttatgactcaaaacttgagataaaggaaatctgcttgtgaaaaataagagaacttttttcccttggttggattcttcaacacagccaatgaaaacagcactatatttctgatctgtcactgttgtttccagggagagaatggggagacaatcctaggacttccaccctaatgcagttacctgtagggcataattggatggcacatgatgtttcacacagtgaggagtctttaaaggttaccaa

SEQ ID NO: 4 - protein, 662 aa, Homo sapiens
MRGAGPSPRQSPRTLRPDPGPAMSFFRRKVKGKEQEKTSDVKSIKASISVHSPQKSTKNHALLEAAGPSHVAINAISANMDSFSSSRTATLKKQPSHMEAAHFGDLGRSCLDYQTQETKSSLSKTLEQVLHDTIVLPYFIQFMELRRMEHLVKFWLEAESFHSTTWSRIRAHSLNTMKQSSLAEPVSPSKKHETTASFLTDSLDKRLEDSGSAQLFMTHSEGIDLNNRTNSTQNHLLLSQECDSAHSLRLEMARAGTHQVSMETQESSSTLTVASRNSPASPLKELSGKLMKSIEQDAVNTFTKYISPDAAKPIPITEAMRNDIIARICGEDGQVDPNCFVLAQSIVFSAMEQEHFSEFLRSHHFCKYQIEVLTSGTVYLADILFCESALFYFSEYMEKEDAVNILQFWLAADNFQSQLAAKKGQYDGQEAQNDAMILYDKYFSLQATHPLGFDDVVRLEIESNICREGGPLPNCFTTPLRQAWTTMEKVFLPGFLSSNLYYKYLNDLIHSVRGDEFLGGNVSPTAPGSVGPPDESHPGSSDSSASQSSVKKASIKILKNFDEAIIVDAASLDPESLYQRTYAGKMTFGRVSDLGQFIRESEPEPDVRKSKGSMFSQAMKKWVQGNTDEAQEELAWKIAKMIVSDVMQQAQYDQPLEKSTKL

SEQ ID NO: 5 - DNA, 21 bp, Artificial Sequence
  Description of Artificial Sequence: Synthetic primer
tctcaatcatgtgcattgagg

SEQ ID NO: 6 - DNA, 43 bp, Artificial Sequence
  Description of Artificial Sequence: Synthetic primer
agcggataacaatttcacacagggatcacacagccatcagcag

SEQ ID NO: 7 - DNA, 23 bp, Artificial Sequence
  Description of Artificial Sequence: Synthetic primer
agcggataacaatttcacacagg

SEQ ID NO: 8 - DNA, 19 bp, Artificial Sequence
  Description of Artificial Sequence: Synthetic primer
ctggcgcccacgtggtcaa

SEQ ID NO: 9 - DNA, 20 bp, Artificial Sequence
  Description of Artificial Sequence: Synthetic primer
tcccaaagtgctggaattac

SEQ ID NO: 10 - DNA, 21 bp, Artificial Sequence
  Description of Artificial Sequence: Synthetic primer
gtccaatatatgcaaacagtt

SEQ ID NO: 11 - DNA, 20 bp, Artificial Sequence
  Description of Artificial Sequence: Synthetic primer
cccacagcagttaatccttc

SEQ ID NO: 12 - DNA, 43 bp, Artificial Sequence
  Description of Artificial Sequence: Synthetic primer
agcggataacaatttcacacagggagctagcttggaagattgc

SEQ ID NO: 13 - DNA, 162025 bp, Homo sapiens
  allele 83587: Nucleotide sequence of Chromosome 17 with genomic sequence of the allelic variant AKAP10-6
gaattcctatttcaaaagaaacaaatgggccaagtatggtggctcatacctgtaatcccagcactttgggaggccgaggtgagtgggtcacttgaggtcaggagttccaggccagtctggccaacatggtgaaacactgtctctactaaaaatacaaaaattagccgggcgtggtggcgggcacctgtaatcccagctactcaggaggctgaggcaggagaattgcttgaacctgggagatggaggttgcagtgagccgagatcgcgccactgctctccagcctgggtggcagagtgagactctgtctcaaaaagaaacaaagaaataaatgaaacaattttgttcacatatatttcacaaatttgaaatgttaaaggtattatggtcactgatatcctgtttcattctttatataatcattaagtttgaaatgtatacttgcactactaacacagtagttaatcttagtcctacaagttactgcttttacacaatatattttcgtaatatgtatgcactggtgtttatgtacgtgtttatgtttatatctgttaaaattagcagtttccatctttttctattttgtaccatcacatcagttcagaaggattgacagagcaaaatgatttgatgaagtataaaagtcacatggtgagtggcataaatacaactctgaacaattaggaggctcactattgactggaactaaactgcaagccagaaagacacatatcctatatgtcaagagatgtaccacccaggcagttaaagaagggaagtacacatagaaagcacaatggtgaataattaaaaaattggaatttatcagacactggattcatttgctcctaaagtcagagtcctctattgtttttttgtttttgtgggtttctttttaaatttttttattttttgtagagtcggagtctcactgtgttacccgggctggtctagaactcctggcctcaaacaaacctcctgcctcagcttcccaaagcattgggattacagacatgagccactgagcccagcccagacgctttagcatttatgaagcttctgaaatagttgtagaaaccgcataagctttccatgtcactttcaaagtttgatggtctctttagtaaaccaaccaagttattcctcaagggcaaaataacatttctcagtgcaaaactgatgcacttcattaccaaaaggaaaagaccacaactatagaggcgtcattgaaagctgcactcttcagaggccaaaaaaaaaggtacaaacacatactaatggaacattctttagaagagccccaaagttaatgataaacattttcatcaaagagaaaagagaacaaggtgttagcaaattcctctatcaaataacactaaacatcaaggaacatcaatggcatgccatgtggaagaggaagtgctagctcatgtacaaaccagtagataatttcaacttgctgccgaatgaaacctctttgcaaggtatgaatcagcacttctcatgtttgttttgctttgttttgttttgtttttagagacaggcccttgctctgtcacacaggctggagtgcagtggcacgatcagagctcactgcaacctgaaactcctgggctcaagggatcctcctgccttagcctcccaagtagctgggactacaggcccaccatgcccagctaattttttaaattttctatagagatgggatctcactagcacctttcatgtttgatgttcatatacaacgaccaaggtacaatgtggaaaagggtctcagggatctaaagtgaaggaggaccagaaagaaaaggggttgctacatagagtagaagaagttgcacttcatgccagtctacaacactgctgttttcctcagagcagagttgatgatctaaatcaggggtccccaacccccagttcatagcctgttaggaaccgggccacacagcaggaggtgagcaataggcaagcgagcattaccacctgggcttcacctcccgtcagatcagtgatgtcattagattctcataggaccatgaaccctattgtgaactgagcatgcaagggatgtaggttttccgctctttatgagactctaatgccggaagatctgtcactgtcttccatcaccctgagatgggaacatctagttgcaggaaaacaacctcagggctcccattgattctatattacagtgagttgtatcattatttcattctatattacaatgtaataataatagaaataaaggcacaataggccaggcgtggtggctcacacctgtaatcccagcacttcgggaggccaaggcaggcggatcacgaggtcaggagatcgagaccatcctggctaaaacggtgaaaccccgtctactaaaaattcaaaaaaaaattagccgggtgtggtggtgggcacctgtagtcccagctactcgagaggctgaggcaggagaatggtgtgaacctgggaggcagagcttgaggtaagccgagatcacgccactgcactccagcctgggcgacagagcgatactctgtctcaaaaaaaaaaaaaaaaaaaaaagaaataaagtgaacaataaatgtaatgtggctgaatcattccaaaacaatccccccaccccagttcacggaaaaattctcccacaaaaccagtccctggtgccaaaaaggttggggaccgctaatctaaataatctaatcttcattcaatgctaaaaaatgaataaacttttttttaaatacacggtctcactttgttgcccaggctggagtacggtggcatgatcacagctcactgtagcctcaatcacccaggccccagcgatcctcccacctaaacttcctgagtagctgggactacaggcacgcaccaccatgcccagctaatttttaaattttttatagagatgggggtctcaccatgttgcccagactggtctcaaaccctgggctcaagtgatcctccctcaaactcctggactcaagtgatcctccttccttggcctcccaaagtgctgggattacaagcatgagccactgtacccagctggataaacattttaagtcgcactacagtcatggacaatcaggcttttcaacatgcagtatggacagtgagtcccagggtctgcttttccatactgaaatacatgtgatactaaggagaaaggtgctcgcaaggatatttaaaatgaagaatatttaaaatgaggaaaaaactgtttcttcatgactttgataaggctgataaagaccatttctgtgatctcaggtgattcactcaagtagtatatttcagtaatcattatctggaacagcctgaatcttaaccaaaataccatgattttttaatgctgttatgataccttgatgatatgaccaaactgcaatgtaggcagctaaatctccacgagtttgacttccccgagagttgacagttttcttcacaaattaaagaaatatattttttgatacatgattggcatatttaaaaactacactgaaatgctgcaaaatgatataaagaaacattttccagaatcaaatgcaatcaaagagtggattaggaatctactcaccattatcaactaaatagaaacacttggactgggtgtggtggctcacatctgtaatctcagcactttgggaggccaaggcaggtggattgcttgaggccaggagctcaagaccagcctgagcaacatagcaaaactctgtctctacaaaaaaaaaaaaaaattaaccaggcatggtggcagatgcttgtaatcccagctactctggaagctgaagtaggaggactgcttgagcccaggagatcaagactgcagtgagccgtggtcatgctgcgccacagcctgagtgacagagagagaccctgtctcaaaaacaaaaacaaacaaaaaacacttaaccttcctgttttttgctgttgttgttgttgtttgtttgttttgagatggagtctcactctgttgcccaggctggagtgcagtggcgtgatcttggctcactgcaagctctgcctcccgggttcacgccattctcctgcctcagcctcccgagtagctgggactataggcgcccgccaccacgcccggctacttttttgcatttttagtagagatggggtttcaccgtgttagccaggatggtcttgatctcctgacctcgtgatccacctgcctcggcctcccaaagtgctgggattacaggcatgagccaccgcacccggccaacctttctgttttttagtttgatatgcttgttaactcagcagctgaaagaatgctgaaagtggccttcagtaaaaaaatttcactagaatctctacatccatatttaatctgaatgcatatccagattgatcagttagagcaaaaacactcatcatcattcctgatgacctctaattctggtttcggctttctatttcaatggaaacagaataaggaaagaaatggaagggctctggaaatttgtcctgggctatagatactatcaaagatcaccaacaataagatctctcctataaatataaaacaagtataattaattttttaattatttttttctcttcagaggattttatttcaagataaaacataacttctacccatactattgattccaaaggttagaaaaagtgtttttcctcatcttatccttcaaagaggtcacagcaatgcaaacatctataaaatgcctctgcataattgtcagaagctatagtccagaaatcattgaaaatgcttttccattttaagcttaggtgaggtgtcttaggaaacctctatgacaacttactctatttattgggaggtaaactcccagactctcccagggtctcctgtattgatctcattttttaggcttcctaatcccttgaagcacaatcgaaaaagccctggatctcttttctgcacatatcatcgcggaattcattcggcttccagcaagctgacactccatgatacaagcggcctcgcccttctccggacgccagtccttgctgcggttagctaggatgaggggtttgctgggcttcagtgcaggcttctgcgggttcccaagccgcaccaggtggcctcacaggctggatgtcaccattgcacactgagctcctggcaggctgtaccaattttttaattatttaatatttatttttaaaattatggtgaatattttggtattctgctctaaaataggcccataaatgcacagcagatatctcttggaacccacagctttccactggaagaactaagtatttttcttttaaagatgctactaagtctctgaaaagtccagatcctctacctctttccatcccaaactaagacttggaatttatgagagatctagctaacagaaatcccagacacatcattggttcttcccagagtgcagtcctcctaaagaggctcagccctaagcaggcccctgcaccaggagggtgggtctgagacccacatagcacttcccaaggtgcatgctccagagaggcactgaaacagctgagcacaagcctgcaagcctggagaactctcacagtcagaacggagggggcccagtgggactaacataaagagaaaagggaacacagagaaatggatggcaccaacaaccagcaaagccttcatggccaatgaaagcatcagtgacggggccagaaccctcatccccaaagactcttcactgcctttagtgaaaaacaatggctagagagtgaagttatgatcatgtatagagaggtaaagttacatttttatattctgactctgctaatgtgaaattccctatctgctagactaaaagtttcagacaccctgttcaaatatcccattagttgctagagacttaaaatgaacagaacgcacattgtcaggatgactattaccaaaaaatcaaaagacagcaagtattggtgaggatgtagagaaactggaacttttgtgcactgtttatgagaatgtaaaatggagcagctgctgtggaaaagagtatgcaggttcctcaaagagtaaaaccaagatgtggaaacaactaaatgcccatcagtggatgaaggggtagacaatatgtggtatatacataccatggagtactattcagcctctaaaaaaaaaaaaggaaattctataacatgcaacagcatggatgaatcttgaggacattttgctaatgaaataaggcagtcatagaaagacaaatactgcacgactccacttatatgagataccaaaaatagacaaattcatagaatcaaagagtacaatggaggttacctggagctgcagggcgggaaacgaggagttactaatcaacgaacataacgttgcagttaagtaagatgaataagctctcaagatcagctgtacaacactgtacctagagtcaacaataatgtattgtacacttaaaaatttgttaagggtagattaacaaatgtagtagatccacaaatgtggttaagtgttcttaccacagtaaaataaaaaaagaatatcaagcccaggagttcgagactagcctgggtaacatggtgaaaccctgtctctacagaaaatacaaaaattagccagctgtggaggtgcactcctagggaggctgaggtgggaggcttgcttgagcccaggaggtcaaggctgcagtgagccatgattgcaccactgtactccagcccagatgacagagcaagacaccaccccccccaaaaaaagaaaaagaatatcaaacattttaaaagatcagatacgcaagaacaacaacaaaaaagagatgaacagagcatcgaccctcatctagtgggattcttggtctaactgaaaaacagacattgagagacaaacaatgacagtgatgtgatcacagcaattacacaggtatcccctggggactgcagaagaaaggaggaatgcctaactttcagaaaatagagaaagcgtcaaacagttggtgaaagccttccaaaactagagagaactgcacacaccaaatcacagaaagaagaaaagccgtgggagattctgggacccaccggctatttttgatggctgaacaccctgctgcaggagagacaggagctggaaagcatggtgggatgaaacctcaaacagctttgcctgcattgcttaagatgactgggcttgattaactctagtcaatggggacaattcaatcaaagaagaaagatgctcaaattcacattttagaatgattttttatggcagtatggggaatagattaaaagagagtgaagctggaggcaagaaacttgttaagaggcaactgaaacagtctagatgataaataataaactgacagagtgactagaaaaatcagaacaggctgaatcaacagatacctagatgaaaataacaggacttgatcaccagttgtatcttggagaggaaggagttgtttccttgctttccctacgactgggaatacggaaggtttgccgtgtgtattggttatatactggtgtgtagccaatcactgacaaccatttagcagcttaaaacacaaaggcttatctcccagtttctgtgggccaggaatctaagataggcttagctggctggttctggctcagagtttctcaagaggttgcaatcaagatgtcagctggggttgcatcatctgaaggctcaactggggccggagggtccacttccaaggagttcactcacctgcctgacaaggcagtgctggttgttggcaggagatctcaattcattgccaagtgagcctctctatagcattgctggaacatcctccccatctggcagttggcttctctcagcatgagtgatctgagagagagagcaaggaggaagccacagtgttcttcctactcctactcctaacactatggacctactcctaacactctcacttctgccttattccattagttagaaagggaactaagctccacctcttgaaataagaagtgtcaaagaatttgtggatatatttaaaaatcatcacactgtggaagtggatagggggttcaattaatgctgaacttgaaatgcctgagacattcaaatgtccaacaggcaatgaacatacccatagatggtcatgactttagcaagaatagaggaagatcacagaattaaggaggaattgaaaggtaaaagaagtggagtcagattccccctgaaaagtgagccatgaaaggaactttaactattgagttagaggtcagagtaggaaatttcggtggaattcttttttaaagaaaggaaccatataagcatgttttgaggtagagggagaataaatcagtagacagggagaggtaaaaaacataaatgataggggatagttgacaaaggtcttggcagaatcccttacccattgacttggggccaagagagggacacttctttgtttgagggataaggaaaataagaaagaatgggtgctatttagtgtggtcctgtctctagggcaaacgcataggtaacaaactgtgtgtgttaggaatatagatgtgacctcacattgagattctcacctcaaatccattttgttgttacctgtaccttcctaccttctctttttgctacatgcagactgctgttttgtcttcctggcctgttccaggtttcagcattctggcatatctgctaccctgttcccaaacctctctagagtccatgctccttccttggatagtgtttgattgggccacgtatctaagaagtgatgccttcagttaggcctgagaacctcctctatggaaatctccatcagtgaccctgacagacttggtatcttggagatgtcactgctcccagcctgtggtctaggagaatctcagcctgggcctctagtagtatggataaggcgttaaggtatctttgaaccagagtctgtcatattcctcaatgtgggacagataaaacagtggtagtgctggtgtttctgagctagaactctggtttttggtctagattctttgatgtatgacctttcagaggtattaaaatttgttctaatacaatgttcaatacaaatgtagttccttttctgttaggacctcaacaaaacatgaccaactgtagatgaacattaaactatgacaattcatggaaatgaatacagtaatacctgcggttcccccattttagcagtcactatggtgacatttggcacaaatggctatttaagggtgcttttgttaaaacctaccatcttactaggcacatgatattgaaactaatgaaataatggagaaacttcttaaaaacttttaatgaataaagtgatgaagtgataatattttagctgctatttataaagtgactattacaggtcaaacattcttctagggtttttttgttgaagttgtcacatttaatccttaataacccactatgagtcaggtattcttctctcccctttggacagttggggaaatgggggtcagagaggttaggtaatttgctcagggccacacaacctgcatgtagaaaatctgagatttgtacaggaacgtatcaaactctgaagtccatgcttctattttcccatgctgcctttctaataaaaggtaactaatgctactggatgctgcccccaaagtgagtcactttcaccccaccctacttgattttctccataaaactaatcacatcctgacaacttatttattgctgatctcccccactagattataaactcaataaaagcaagatccttgtctgctgaatatcagtacctaaaacgctgtctagcacagagcaagtaattaatatttgttgaatgaacaaataaaggaaaaaaattcaaaggaagaaaaagccctaaaacagatgtttacctaaacatacattttaaaagaaagcatataacaaattcaggacagaatttaaatttgattttttaaagaaataaccaagtgctagctgggcacagtggctcacacctgtaatcctagcactctgggaggccgaggcaggcagatcacttgaggtcaagagttcaagaccagcctggccaacatggtgaaacctgtctctactaaaaatacagaaattatccaggcatggtggcaggtccctgtaaccccagctactcaggaggctgagtcaggagaattgcttgaacccaggaggcagaggttgcagtgggccaagattgcaccactgcactccagcctgagtaacaaagcaagactctgtctgaaggagaaggaaagaaagaaggaaagaaggaaagaaggaaagaaggaaagaaggaaagaaagaaagaaagaaagaaagaaagaaagaaagaaagaaagaaagaaagaaagaaagaaagaaagaaaaagaaagaaagaaagaaagaaccaagtgcttatttgggacctactatgctatgtttttccatgcacgctattttcagtaaagcagttagcaaacttgcaagatcataacaacaaatatatgcttctataactctaaaattgtgctttaagaagttcctctttaccagctcatgtatgcattagttttctaagagttactagtaactttttccctggagaatatccacagccagtttatttaaccaaaggaggatgcttactaacatgaagttatcaaatgtgagcctaagttgggccagttcatgttaatatactccagaacaaaaaccatcctactgtcctctgacaattttacctgaaaattcattttccacattaccaaggagccagggtaggagaatatagaaagaccacccaagaatccttacttctttcagcaaaatcaattcaaagtaggtaactaaacacatgccctaacaatgaatagcagattgtgctcagaagaatgatctacaacatcttactgtgaaggaactactgaaatattccaataagacttctctccaaaatgattttattgaatttgcattttaaaaaatattttaagcctaaattttaaaaggtttgatattggtacatgaatagacaaacagacatggactagaccaagaattaggttcaaacatatacaggaatttaatatacgataaatctagtattccaaaggaaccaacaaatggtgttcagacagcaggataggcatcaggaaaaacacagttgggcaccctaccttactcctaacaccaggagtaactgaaggagcaccaaatatttatttattttaattatagttttaagttctagggtacgtgtgcacaacatgcaggtttattacataggtatacatgtgccatgttggtgaggagcaccaaatatttaaaagaaaaaaattggccaggggcggtggctcacacctgtaatcccagcactttgggaggccaaggtgggcagatcacctgaggtcgggagttcgagaccagcctgagcaacatggagaaaccccatctctactaaaaatacaaaattagccaggcatggtggcacatgcctgtaatcccagctacttgggaggctgaggcaggagaatagctttaatctgggaggcacaggttgcggtgagctgagatattgcactccagcctgggcaacaagagcaaaacttcaactcaaaaaaattaataaataaataaaaataaagaaagaaaagaaaaaaatgaaaatagtataattagcagaagaaaacaccgtagaatcctcggactcttaggatggggaatgcctataatataaaaaccctgaagttataaaagagaaaatcacctacatacaaaccaaatctttctacatgcctaaaacatagcacaaacacagctaaataatcatagctgaatgaactgggaaaacaaaacttgactcatatccagacagagttaattttcctacacataaagagtacctatataaacccaacaaaaaaaccaccactaacccaaaataaaaatgtgacaggtaatgaacaggtagttcacagagaatacaaatggctcttcggcacataagatgctcagactgacttttacttatttattttttgagagacagggtctcacgatgttgcccaggttaggctcaaactcctgggctcaaatgatagtaccaggactacaggtgtgccccaccgcacctggctcctcaaccacctgtattaacaggaaatgcaaaataaaactttcaaatctattttacctattagaatggcaaaaatttgaaaaacttcaaacatcatcatgttggtgagaatgtgaggagactggcactctcattttttgctgatagcatatatatactgatggcttctatggaaagcaatctggcagcgtctatcaaatgtacaagtgcatatatcctttgacaaagcaattccactctaggaatgtgttctatatggttgtgcttcctggggctgggaactgggagctaagggacaggggcagaagataatcttcttttccctccttccccgttaaacatgttgaattttatatactgtaatatattatttttcacaaaagataatttttaagcgatatgtctgggaatttttttttttcttttctgagacagggtctcactctgtcatccaggctggaatgccatggtatgatctcagctgactgcagcctcgacctcctgggttcaagcaatcctcccacctcagcctcctgagtagctgggactacaggcacgtgccatcatgctaatttttgtatatacagggtctcactatgttgcccaggctaatgtcaaactcctaggctcaagcaatccacccacctcaggctccaaagtgctgggattacaggcgtgagccaccgcgcctggccctgggaattcttacaaaagaaaaaatatctactctccccttctattaaagtcaaaacagagaaggaaattcaacctataatgaaagtagagaagggcctcaaccctgagcaacaaacacaaaggctatttctgagacaggaatttgctgaacaaaatcgagggaagatgacaagaatcaagactcacttctcggctgggcgcagtggctcacacctgtaatcccagcactttgggaggccgaggcggacagatcacgaggtcaggagattgagaccatactggctaacacagtgaaacccagtctctactaaaaatacaaaaaattagccgggcgtggtggcaggtgcctgtagtcccagctacttgggaagctgaggcaggagaatggcgtgaacccaggaagcggagcttgcagtgagccgagatcacgccactgcactccagcctgggtgacagagcaagactctgtctcaaaaaaaaaaaaaaagactcatttctctagatcttgagccgtattcaaatttatctcagcttagtgagaggttaaagcaaggaatatccttccctgtgggccctgctccttactgaaggaaggtaacggatgagtcaaggacaccaatggagaaaagcactaacaccattatctgatgaacattacgtgaagaagggtaagaagtgaagtggaattgctgaagaagtcagtgaaagcggacattcatttggggaaatggaatataggaaatccataaaagtgattaaaaagatgttagaggctgaggcggggggaccacagggtcaggagatcgagaccatcctggctaacacggtgaaaccccatctctactaaaaatacaaaaaattagccaggcgtggtggcaggcacctgtagtcccaactactcgggagactgaggcaggagaatggcatgaacctgggagacggagcttgcagtgagccgagatcacgccactgcactccagcctgggtgacagagtgagactccatctcaaaaaaaaaagttagatacgagagataaagatccaacagacacacaactgctaattctgaacagaacaaaacaaatggcacaggaaaagaaaatttaagatataacaccggaaaactttcctgaaattgagtaactgaatctatagcttgaaagggtttagcatatgccaagaaaaatcagtagagtccaaccagcacaagacacatctagcaaggctggtgattctaccaacacagagaaagaagtgggtgacccataatgcggaaaaaggcagaccatctgcagtcttctccagaacactggagtctgaagacaaaagaatgctgcctactgagccagaagggagagaaagtgacccaacacatctttaccaagttagaatgtcacgcattatttaaaggctgcaaaagccatgaaagacatgaaagaacacaagcatttacaacatgaaagaacacaagcattctcatactcaagaatccttaagaaaaatgtagtcctaatccagcccactgaaagttaaatgtacttaatgtgctcattaatgggaacttcatagcttcaaatcagtctggtcccatctaccaacatctctcgcccggctttcctgcaatagtcagcacctttccctcctcccagtcttgtcccctggagtctgctctcagcatagcagagtgaccacatcaacacccaagtcagagccctccagtgcgcactggtctacaaagcccttcccaccccccaccccacgtgccctccggatccttgtgacgtgtctcctgcataccctagcagccctggcctcctcactgcccctcctgtacatcaggaaggcgactccttgagtcttggctctggccgcctcctccacctgcagtgagttaactcccttacctactctaggtcattgctcaaatgtcagcatctcaatggggccctccctgactaccctatttaaattctacatactccccttgaccccatggacctcactcaccctattccacttttattcttacaatttagcacttgttctcttctaacgtattctaagacttactcatttattacattgtttgccaccccctctagtacataaactccagaggggcagggatttctgtctatttattcatttctttatccctaggacatagaacagggcatagttcagagtattcaatgttatcaatgaatgaactagcagtagtaccagttccagttaggcacagaattaaatctaaatagaattaaatctcatggtctgggttaactatggatagaaaattagatataattttaagaagcctagaaagaaaaaattaataatgtaaaaataatattaatttgataataataacaaaaactctgccaggcactgtggctcaaatctgcaatcccagctactcaggaggctgaggtggaaggatcacttgagaccagagttcaagactcagcctaggcaacacggcaagaaactgtctctaaaaaaattaaaacttaaatttttaaaaaagaattctcaaagcgtcacaaaaactggagattaaggtacaggaagtgtgaagtaatattactatgctaatggttttttttttttttagaaaggtataaccaaaagatttctttctcaagtcgataaactgagaaagataagcatatcttccaattaacagagggggaggaaaagccagatacaacaaaataagatataaattagtttccagttgaaaacaagagtaggagttattttgcatcacctcacctgtgacctcccccagcccaaaaaacactactgataaacagggtagaaaagcatcatctcagataaagcaggaaaaactgccacagtctcaaaccacaaactataagcacacacctggccaaccctgccaagtctgggctcagtaggaggaacgtgctgagagctaggatgtaccaacttagacattctgtgggatacagatgtccctggaagggtcacaccatctcaaaggcacctgtaatgcccactgattacagccaccatatgtgagagagaaactcagggcacttagagagtataacaagaaccttatgtcatctgagatgaggaatcctcagccctgcaaattaaccaactctttagaacaactggcaaaacataaatatccacaacttttgtttcagtaattccactcttagatatcaatccaaagtacatgagacagcagatacacacacaaaatggtatttactgcagcattgtttataatagcaaaaaacaagaaataatccatatgtctcaataggatactgggtacatgagggtatgtacccatcattcaaccatcaaaaagagtgatatggatgtccacagatggacataaaaagctgtgtgttacgtgaaaacaaactcaagcagcagcaggatgggcttatgatagtcagtatgagctaatttctggaaaaaaaaatctagtgtgtgcacagaaaacatctgaaagaacagaaacaaaactatcagcagaatattgagatgttttactaagttgtatatctatactgcttgtaatttttaccccaagcaagaattactttttggaaaaagaaaattcaggaaataaagcatttctttaaacttcatgtttaaacaaatggtgatggaataaaagagttcttattcatcataaacacacacagcacacatgcacgcatgtgcgtgagcacaccctttacttgataaataccatgttgaatattttagtctttccttttaggttctatcccttcactcaaaatgcggttataaataaatgtacttttcatgtgccttctgcctaaacccactttaatataactttacagtcccattatcattatagtctcaaagctagactcagcctgaaactaccctttcatttggaacccttattaaaatgccacatacagctccttcaaataaaaacaaaccctaggacctgacactaggcttcctttgttgctactcataatggccaagttctgtgcttataatacatcttctttcattttattgctacatatccaagggttttatatgtttttcttattatatcttaattcaaaacaccatcacgctcttttccagatgaaaataaggaaaagaaattgagcaactgactgacttaaaggtcataaaactatatagtagcagagtcagcaaaagaagaaacacacatctcccaagtagaggctgaaaaccagtaccattcacctccagggtgagctatatacagattacaaagtcaccttctctaaatgttcaaactgaatcccatacccatactttaccactacctcgtaagaacagcctcagatcttgttatagccttttttttagcatgctgaagccaataaaatgcttcccattcagcaagagaaacaagttctgaaacactgaataatctgcccagggcctatgaacatttccactgtgagaaatgttctccactgtgtggagaagatccttactcttctccacacaggcagaacattagaaaaattcttggattctatgatgcacagcttaggagtctgtttagcacaatttaagtccaaatagttattaaatcctcctctgttccagaaacagtgctaaatactgtgaatataaaaattgaaaagatactctcctggctcccaagaaagtcagccagatagaggagacacaggcacacaaatcactgtcacatgaagctctacctccctaacttcaaacgagggcctaagtcaccaagaatacagtagcagttgtgactacgagtaactactataattcaatactttatcttcccttagaaaactcttctcccttggaaatttatttgcatttctaaataccattccttactaaaaggaagcagggctccttggggaaatagctgattctaggtgtggactatgaaatgaaaatggtgagtctgggacatcccatgttgcccagaaatcaaggaactgcccaaagattaacagagtcatgttaaatggacctaagagtgaaccagaaggagctcactttgccccgcgtggaacaatttcaagaaaaacatgacagtaatgaattataaaacatgaattaaaatacatattggtactaaaaagagaacaaaaggatgtggctttggataaagctcttcttcatggaagaataccagctaataaatgtaaaggaaatgagagaattagaaaaattatcattttgtaaaccttaatatattcacctagacatgctaaaaccactgagtaaaaggctgcttgggaagaggatgctcacatgatctcagagtttcacaccacagataatttattagatacaggaaggaagatgtgatcaagcttcctgtgacccccagccaggccccacaacactatgtgcctccttgtgatgtgggagctacacagcatcgcccacacagcttctcgccaaaactgtttgaagctaatcacaagggaagaactggacagcttctgaccatgagacgctccaccagacaacttgcttggcctctccaaagaaacttgcttggcctctccaaagaaaactcagtttcatttaaaaacaaaactaattatttaaaaacaaacgaaaagcaagttgtggacttgagctccagggacagagcagacatacttttccctgttcttcccagtaagtggtaataaaaaccctcaacactagatataaaacaaatataagaaggttctggaaggggaagaggaggcagactatccaggtgccttgaggcccacagaacaacccagtgatgggttcactgggtcttctttttgcttcattatctcagacttggagctgaagcagcaggcaacttcaaaacaccaaggggcacagattgaaaagccccaagaaaagcctgccctctctagccaaaggaccaggaaggagacagtctaatgagatggaacacatttagacagtaactgcccatttaccagcaataactgagcagggagcctagacttccagtcttgtgaggacgtaccaaggtacccaacacccccaccaaggctgagtaaggactgcgacttttatccctgcatggcagtagtaaggagcccatccctcacccgccagcagtgtcaggggaacctggacttccactcccacccaggagtgatgaggccctccctgctggggtcatgtcagaggaggcctagtggagattcagtgacttaaccttttcccagagataatgaggccacctttcctccctcttcccccatggtgacagtgaaagcactgtggcaagcagtaggcactcctacccctcctagccagggaggtatcagggaggccaagtagggaaccagaatacccacaaccacccagcagcaacaggggtcccccaccccattgggtgtcaatggaagcagagcggaaagcctggatatttacccccatctagaagtaacaagctgatgtcccccttcttctactacaatggtgttcaaaacaggtttaaataaggtctagagtctgataacgtaatacccaaatcgttgaagttttcattgaggatcatttataccaagagtcaggaagatcccaaactgaaagagagaaaagacaattgacagacactagcactaagagagcacagatattagaactacctgaaaggatgttaaagcacatatcataagcctcaacaggctgggcgcggtggctcacgcctgtaaccccagcactttgggaggccgaggcaggtggatcacaagatcaggagatcgagaccatcctggctaacacggtgaaaccccgtctctactaaaaatacaaaaaaaaatagcaaggcatggtggtgggcacctgtagtcccagctactcgggagcctgaggcaggagaatggcatgaacctgggaagaggagcagtgagccgagatcgcaccaccgcactccagcctgggcaacagagcaagacttcgtcccaaaaaaaaaaaaaaaaaaaaaaaaagcctcaacaaacaactacaaacgtgcttgaaacaaatgaaaaaaaaatcttggcaaagaaataaaagatatatattttggccaggtgcagtggctcacagcctgtaatccctgcactttgggaggctgaggcaggcggatcacctgaggtcaggagtttgagaccagcctgaccaacatggagaaaccccgtctctactaaaaatacaaaattagccagtcatggtggcacatgcctgtaatcctagctactcaggaggccgaggcaggagaatcgcttgaactcaggaggtggaggttgcggtgagccgagatcccgccattgcacattgcactccagcctgggcaacaagagcaaaactccatctcaaaaaaatagatacatattttaatggaaattttagaattgaaaaatacagtaaccaaattgaatggaaagacaacatagaatggagggggcagacaaaataatcagtgaacttcaacagaaaataatagaaattacccaatatgaagaacagaaagaaaatagactggccaaaaaataaagaagaaaaaagaggagcagcaggaggaatgatggaaaaagagaaaggaaggaaggaagggaaggagggagggaaggagtgagggagaaagtctcaaagacctctgagactaaaataaaagatctaacacttgtcatcagggtccaggaaagagacaaagatggcacagctggaaacgtattcaaaaaataatagctgaaaacttcccaaatttggcaagagacataaacctatagattcgaaatgctgaaccccaaataaaaagcccaataaaatccacaccaaaatacatcatagtcaaacttctgaaaagacgaaaagagaaaacgtcttgaaagcagtgagtgaaacaacacttcatgtataagggaaaaacaattcaagtaacagatttcttacagaaattaaggaagccagaaggaaatgacacaatggttttcaagtgctgaaagaaaagaagtgtcaacacaaaattctagattcagtaaaaatatccttcaagaatcaatgggaaatcaagacagtctcagataaagcaaaataagagaatatgttgccagcagatctcccctaaaggaatggcaaaaggaagatcatgcaacagaccaaaaaatgatgaaagaaggaatccagaaacatcaagaagaaagaaataacatagtaagcaaaaatacatgtaattacaataaaatttctatctcctcttaagacttctaaattatattgatggttgaagcaaaaattataaccctgtctgaagtgcttctactaaatgtatgcagagaattataaatggggaaagtataggtttctatacctcattgaagtggtaaaatgacaacactgtgaaaagttacatacacacacacacgtaagtatatataaatatatgtgtgtatatgtgtgtgtatatatatatatacatataatgtaatacagcaaccactaacaacactatacaaagagataataaccaaaaacaatttagataaattgaaatggaattctaaaaaatattcaaatactctacaggaagacaagacaaaaagagaaaaaaagaggaggacaaactaaattttttaaaaacataaataaaatggtagacttaagccctaacttatcaataattacataaatgtaaatgatctaattatatcaattaaaagacagagatagcagagttaatttaaaaacatagctataagaaacctgctttgggctgagtgcagtgactcacacttgtaatcccagcacttcgggaggccaaggcgggtggatcacctgaggtcaggagttccagaccagcctggacaacatggtaataccccatctctactaaaaatacaaaaaaattagccaggcatggtggcacacgcctgtagtcccaactactcaggaggctgcgacacaagaactgcttgaacccgggcagcagaggtagcagtgggccaagattgcgccactccagcctgaacgacagagtgagactccacctcagttgaaaaacaaaaaagaaacctgctttaaatataccaacatatgttggttgaaattaaaagaataaaatatatcatgaaaacattaatcaaaagaaaggagtggctatattaataacataaaatagacttcagagaaaagaaaatttcaagagacaggaataaaaggatcaagaaaagatcctgaaagaaaagcaggcaaatcaatcattctgcttggagattcaacaccctctcttaacaactgatagaacaactagacaaaaaaatcagcatggagttgagaagaacttaacaccactgaacaacaggatctaatagacatttacggaacactctacccaacaatagcaaaataaacattcttttcaagtattcactgaacatatccttagaccctaccctgggccataaaacaaagctcactagtgattgccgaaggcttggatggacagtggaagagctgcatggggagggagaaggtgacagttaaagagtgtaggatttctttttgggataatgaaaatgttccaaaattgattgtggtgatgttggcgcaactctacaaatataaaaaaggccattgaattgtacgttttaagtgggtgaaacatatggtatgtggattatatctaacgctttttaaaaacttaacacatttcaaagaatagaagtcatacagagtgtgctctactggaatcaaactagaaagaggtaactggaggataacgagaaaagcctccaaatacttgaaaactggacagcacatttctaaaatcatccgtgggtcaaagatattcatttctgatattcatttttattgtttaatgtatttttaaaaatttcttaagggaaataaactgactaaaaatgaatatggctgggtgcggtggctcacgcctgtgatcccagcactttgggaggccgaggctggtggatcacaagatcaggagttcgagaccagcctggccaagatggtgaaaccccgtctcaactaaaaaactacaaaaagtagccaagcgcagtggcgggagcctgtggtcccagctacttgggaggctgaggtaggagaatcgcttgaacacaggcagcagaggttgcagtgagccaagattgtgccactgcacgccagcctgggcgacagagactgcctcaaaaaaaaaaaaaaaaaaaagaatatcaaaatttgtgggacatagttaaagcaatgctgagagggaaatttataacactaaatgtttacattagaaaagagaaaaagtttcaaatcaatagtctccactcccatctcaagaacacagaagatgaagagcaaaataaacccaaagcaagcaaaagaaagaaaatataaaaataaatcagtaaaattgaaaacagaaacacaataaagaaaatcagtgaaacaaagtactgattcttcgaaagattaataaaattgacaaacctctagcaaggctaacaaacaaaaaagaaagaagacacggattaccagttattagaatgaaagcataattagaaacaactctacacattataaatttgacaatgtagatgaaatggactaattactgaaaaaacacaaattaccacaactcacccaatatgaaatagataattgggatagcctgataactactgagaaaattgaatttgtaattttaacactcttaaaacagaaacattaaacttaatattttataaatattagataaggtaattatacccttccttaacaaataaaaacgacaaattattttgcagctaaagagatgtatgtactgtgaaaaatatcttcagaaaaatagaactttgtttgaagaataaggatttaaaaaatgtttttaactctcaagaagcaaatatctgggcccagatggtttcactgaagaattctaccaaatgtttaatgaagaattaccaccaactctacatagcatctttgagaaaactgaagagaagggaacatctcccagttcattttatgaagtgggtgttactctgatactagaactgtataaggacagctactcttgacacactgcctatgggtagctctgctctgcaggaacagtcagaaaaaaaaaaaaaagaagcactggacaagggcagtataaaaaaagaaaactgggccaggtgcagtggctcacacctgtaatctcagcactttgggaggctgacgctggtggatcacctgaggtcaggagtttgagactagcctggccaacatggtaaaaccctgtctctactaaaatacaaaaattagccaggcagggtggtggggaaaataaaaaggaaaaaaaaacaaaaataaactgcagaccaatatccttcatgagtatagacacaaaactccttaaactccttaacaaaatattagcaagtagaagcaatatataaaaataattatacaccatgatcaagtgggacttattccagaaacgcaagtctggttcaacatttgaaaacaaggtaacccactatatgaacgtactaaagaggaaaactacataatcacatcaatcaatgcagaaaaaagcatttgccaaaatccaatatccattcatgatactctaataagaaaaataagaataaaggggaaattccttgacttgataaagcttacaaaagactacaaaagcttacagctaacctatacttaatggtgaaaaactaaatgctttcccctacgatcaggaacaaagcaaggatgttcactctcattgctcttatttaacatagccctgaagttctaacttgtgcaaaacgataagaaagggaaatgaaagacctgcagattggcaaagaagaaataaaactgttcctgtttgcagatgacatgattgtctcatagaaaatgtaaagcaactaggggtaggggggcagtggagacacgctggtcaaaggataccaaatttcagttaggaggagtaagttcaagatacctattgcacaacatggtaactatacttaatatattgtattcttgaaaatactaaaagagtgggtgttaagcgttctcaccacaaaaatgataactatgtgaagtaatgcatacgttaattagcacaacgtatattactccaaaacatcatgttgtacatgataaatacacacaattttatctgtcagtttaaaaacacatgattttggccaggcacagtggctcatacctgtaatcccagcattttaggaggctgaggcgagcagaaaacttgaggtcgggagtttgagaccagaatggtcaacatagtgaaatcccgtctccactaataatacaaaaattagcaggatgtggtggcgtgcacctgtagacccagctacttgggaggctgaggcacgagaattgcttgaacaagggaggcagaggttgcagtgagctgggtgccactgcattccagcctggtgacagagtgagactccatctcaaaaaaaataaaataaagcatgacttttcttaaatgcaaagcagccaagcgcagtggctcatgcctgtaatcccaccactttgggaggccgaggcaggcagatcacaaggtcaggagtttgagaccagcctgaccaacatggtgaaaccccatctctactaaaaaatatataaattagccaggcatgtgtagtctcagctactcaggaggctgaggcaggagaatcacttgaacccggaggcagaggttgcagtgttgagccaccgcactccagcctgggtgagagaacgagactccgtctcaaaaaaaaaaagcaaaataacctaattttaaaaacactaaaactactaagtgaattcagtaagtctttaggattcaggatatatgatgaacatacaaaaatcaattgagctggacaaaggaggattgttttaggtcagtagtttgaggctgtaatgcacaatgattgtgcctgtgaatagctgctgtgctccagcctgagcagcataatgagaccacatctctatttaaaaaaaaaaaaattgtatctctatgtactagcaataagcacatgggtactaaaattaaaaacataataaatactgtttttaattgcctgaaaaaaatgaaatacttacatataaatctaacaaaatgtgcaggacttgtgtgctgaaaactacaaaacgctgataaaagaaatcaaagaagacttaaatagcgtgaaatataccatgcttataggttggaaaacttaatatagtaaagatgccaattttatccaaattattacacaggataacattattactaccaaaatcccagaaaaattttacatagatatagacaagatcatacaaaaatgtatacggaaatatgcaaaggaactagagtagctaaaacaaatttgaaaaagaaaaataaagtgggaagaatcagtctatccagtttcaagacttacatagctacagtaatcaagactgtgatattgacagagggacagctatagatcaatgcaaccaaatagagaactaagaaagaagcacacacaaatatgcccaaatgatttctgacaaaggtgttaaaacacttcaacgggggaagatatgtctctcattaaagggtgtagagtcattgcacatctataggcaaaaagatgaacctgaacctcacaccctacagaaaaattaactcaaaatgactcaaggactaaacataagatatacatctataaaacatttagaaaaaggccacgcacggtggctcacgctcgtaatcccagcactttgggaggccaaggcaggtggatcacctaaggtcaggagtttgagaccagccggatcaacatggagaagccccatctctactaaaaatacaaaattagctggacgtggtggcacatgcctgtaatcccagctacttgggaggctgaggcatgagaatcgcttgaacccggggggcagaggttgcggtgagccaagatcacaccattgcactccagcctgggcaacaagagcaaaactccaactcaaaaaaaaaaaaaaaaaggaaaaatagaaaatctttgggatgtaaggcgaggtaaagaattcttacacttgatgccaaactaagatctataaggccagtcgtggtggctcatgcctgtaattccagcactttggtcaactagatgaaaggtatatgggaattcactgtattattctttcaacttttctgtaggtttgacatttttttagtaaaaaattgggggaaagacctgacgcagtggctcacacctgtaatcccagcactttgggaggccggggcaggtggatcacacggtcaggagttcgagaccagcctggccaacatggtgaaaccccgtctctaccaaaaatataaaaaattagccgggtgtcatggtgcatgcctgtaatcccagctactgaggaggctgaggcaggagaatcacttgaacctgggaggtggaagttgcagtgagccgagattgtgccactgcactccagccttgggtgacagagcgagactccgtctcaaaagaaaaaaaaaaaaaagaatatcaaacgcttactttagaaactatttaaaggagccagaatttaattgtattagtatttagagcaatttttatgctccatggcattgttaaatagagcaaccagctaacaattagtggagttcaacagctgttaaatttgctaactgtttaggaagagagccctatcaatatcactgtcatttgaggctgacaataagcacacccaaagctgtacctccttgaggagcaacataaggggtttaaccctgttagggtgttaatggtttggatatggtttgtttggccccaccgagtctcatgttgaaatttgttccccagtactggaggtggggccttattggaaggtgtctgagtcatgggggtggcatatccctcctgaatggtttggtgccattcttgcaggaatgagtgagttcttactcttagttcccacaacaactggttattaaaaacagcctggcactttcccccatctctcgcttcctctctcaccatgtgatctcactggttccccttccctttatgcaatgagtggaagcagcctgaagccctcgccagaagcagatagtgatgccatgcttcttgtacagcctacaaaaccatgagcccaataaaccttttttctttataaattatccagcctcaggtattcctttatagcaagacaaatgaaccaagacagggggaaatcaacttcattaaaataatctatgcagtcactaaacaaataagaacaagaggctccagaagtgggaagccaatacccagagttcctacaatacagtatctgaaaagtccagtttccaaccaaaaaatatatatatacaggccggacatggtagcttatgtctgtaatcccagcactttgggatgctgaggcgggcagatcaccctaggtcaggagttcgagaccagcctggccaatatggcaaaaccccgtctctactaaaaatacaaaaattagccaggcatggtggtggatgcctgtaatcccagctactcgggaggctgaggcagggaatcacttgaacccaggaggcagaggttgcagtgagccgagatcacgccactgaactccagcctgggcaacaaagtgagactccacctcaaaaaaaaaaaaaatatacatatatatatgtgtgtgtgtgtgtgtgcgcgcgtgtgtgtatatacacatacacatatatacatatatacagacacacatatatatatgaagcatgaaaagaaacaaggaagtatgaaccatactttctgtggttatgataggatggggtatcacgggggaagtagacaagggaaactgcaagtgagagcaaacagttatcagatttaacagaaaaagactttggagtaaccattataaatatgtccacagaattaaagaaaagcgtgattaaaaaaggaaaggaaagtatcataacaatattactccaaatagagaatatcaataaaggcatagaaattataaaatataatacaatggaaattccggagttgaaaggtagaataactaaaatttaaaattcactagagaaggttcaacactatatttgaactggcagaagaaaaatttagtgagacaaatatacttcaatagacattattcaaatgaaaaataaaaagaaaaaagaatgaagaaaaataaacagaatctcagcaaaatgtggcacaccattaatcacattaacatatgcatactgagagtaccggaagcagatgagaaagaggaagaaaaaatattcaaatgatggccagtaacttcctagatttttgttttaaagcaataacctatacaatcaagaaactcaatgaattccaagtaggataaatacaaaaagaaccacaaacagatacaccatggtaaaaatgctgtaagtcaaaaacagagaaaatattgaaagcagctagaggaaaacttataagagaacctcacttacaaaagaacatcacttataaaagaaccacaataatagaaacagttgacctctcatcagaaacaatgaatgataacatatttgaagtgctcaaagaaaaaaaataaagattcctatatacgacaaagctgtctttcaaaaatatacatccaaaaggattgaaaccagggtcttgaagagttatttgtacatccatgttcatagcagcattattcacaatagccaaaaggtagaagcaacccaagggtccatcgacaaataaataaaatgtggtatatgtatacacaatggaatttattcagtattaaaaaggaatgaaattctgacacatgctacaacatggctaaaccttgagaacactatgctaagtgaaataagccagccacaaaaggacaaataccatattacttcacttgtatgaaatacctagggtagtcaaattcagagatagaaagtaaaacagtggttgccaagggctgagggagggagtaacgtggagttattgttgaatgggtacagaatttcagttttgcaagataaaaagagttctggagacagatggtggtgagggtggtacaacaatacaaatatactttatactactgaacagtatacttaaaaatgattaacatggtgaaaccccgtctctactaaaaatacaaaaaaattagctgggtgtggtggcgggcacctgtaatcccagctacttgggaggctgaggcagcagaattgcttgaaaccagaaggcggaggttgcagtgagctgagattgcgccaccgcactctagcctgggcaataagagcaaaactccgtctcaaaaaataaaaaataaaaaaaatttaaaaatgattaagcaggaggccaggcacggtggctcacacctataatgccagcactttgggaggccgaggcaggcgatcacttgagaccaggagtttgagaccagcctggccaacatggcaaaaccctgtctctgctaaaaatacaaaaattagccaggcatggtggcatatacttataatcccagctactggtgagactgagacacgagaattgcttgaacccaggaggcagagattgcagtgagtcgagatcgcgccactgaattccagcctgggcgacagagcaagattctgtctcgaaaaaacaaaaacaaaaacaaaaagcaaaaccaaaaaataattaagcaggaaacgagattgctgctgaggaggagaaagatgtgcaggaccaaggctcatgagagcacaaaacttttcaaaaaatgtttaatgattaaaatggtaaattttatatgtatcttaccacaaaaaaaagggctggggggcaggaaatgaaggtgaaataaagacatcccagagaaacaaaagtagagaatttgttgccttagaagaaacaccacaggaagttcttcaggctgaaaacaagtgaccccagagggtaatctgaattctcacagaaaattgaagcatagcagtaaaggttattctgtaactatgacactaacaatgcatattttttcctttcttctctgaaatgatttaaaaagcaattgcataaaatattatatataaagcctattgttgaacctataacatatatagaaatatacttgtaatatatttgcaaataactgcacaaaagagagttggaacaaagctgttactaggctaaagaaattactacagatagtaaagtaatataacagggaacttaaaaataaaattttaaaaaatttaaaaataataattacaacaataatatggttgggtttgtaatattaatagacataatacaaaaataccacaaaaagggaagaagacaatagaactacataggaataacattttggtatctaactagaattaaattataaatatgaagtatattctggtaagttaagacacacatgttaaaccctagatactaaaaagtaactcacataaatacagtaaaaaaataaataaaataattaaaatgtttgtattagtttcctcagggtacagtaacaaactaccacaaattgagtggcttaacacaacttaaatgtattttctcccagttctggaggctaaacacctgcaatcaaggtgagtacagggccatgctccctgtgaaggctctaggaaagaatcctcccttgtctcttccagcttccagtggttctcagtaaccctaagtgctccttggcttgtagctatatcattcctagcaaccagaaagaagaaaataataaagattatggcaaaaaataatgaaatcaaaaggagaaaaatggaaaaaaataaataaaaccaaaagctagttctttgaaaagatcaaccaagttaacaaaccttttaactagactgacaaaaaggaggtaagactcaaattactagaatcagaaataaaagaggggacattactaatgagggattagaaaagaatactacgaacaaatgtgtgccaacaaattagaaaacttagatgaaatggacaggttcctaggacaacatcaactaccaaaatttactcaagaagaaagagacaatttgaatgagctataacaagggaagagactgaattgacaaccaagaaactatccacaaagaaaatcccaggcccagaagatttcactgtgaaattctttcaaacttataaatataaattaacatcagttcttcacaaactcctccaaaaaaaagaacagatctctatttacaggcgatacgatctttagaaaatcctaagggaactactaagacactatgataactgataaacaagttcagcaaggctgcaggatagaaaaccaatatacaaaaatctattatatttctatacacttgcagtgaacaacccaaaaatgagattaagaaaataattcaatttacaataacatcaaaaagaataaaaacactcaaaaataaatttattcaagtaagtgcaaaacttatactctagaagctacaaaacactgttaaaagaaattaaaggtttacataaatgaaaaactatcccatgttcatggatcaaaagacttattactggcaatgctctccaaattgatctataaattcaacaaaatccttatcaaaatcccagatgaggctgggggtggcggttcatgcctgtaatcccagcactttgggaggctgaggcacgcagattacctgaggtcgggagctcgagatcagcctgaccaacatggagaaaccctatctcttctaaaaatacaaaattagtcaggcgtggtggcacatgcctataatcccagctactcgggaagctgaggcaggagaatcgcttgaacccaggaggcagaggttgcagtgagccaagatcgtgccattgcactccagcctgggcaacaagagcaaaattccatctcaaaaaaaaaaaaaaaaaaatcccagatgacttcactgttgaaattgaaaagattattctaaaattcacatggaattgcaagaccttgagaatagccaaaacaaacttgaaaaacacgaacaaaatataggatgactcacttgccaattgcaaatgttacgacacagcaacagtaatcaagactgtgtggtactggcaaaagacacatacatacatacatatcaatggaatataattgagagtacagaaacaagcctaaacatctatggtaagtgcttttctatttttttctttttttttttcttttttgtagagatagaatctcaccatgttgcccaggctggtcttcaacttctgggctcaagcaatcctcccactgtggcctcccaaagtgctgggataactggcatgagccaccacatccagcccagatgattttcaaaaaagtcaacaagaccattcttttcaacaaataggtctgggatgatcagatagtcacatgaaaaaaaaaatgaagttggaccctccatcacactaaagtgctgcgattataggcatcagccaccacatccagcccaaatgattttcaaaaaggtcaacaagaccattcttttcaacaaataggtctgggataatcagatagtcacatgaaaaaaaaaatgaagttggaccctccatcacaccatatgcaaaaattaattcaaaaatgaattgatgacttaaacgtaagagttacgactgtaaaactcttagaaggaaacatacgggtaaatcttaaagacgttaggtttgacaaagaattcttagacatgacaccaaaagcatgaccaactaaggtaaaatagggtaaattgtacctaccaaaatgaaaaacctttgtgctggaaaggacaccatcaagaaatggaaagccaaaatagccaaggcaatattaagcaaaaagaacaaagctggaggcatcatactacctgacttcaaagcaacagtaaccaaaacagcatggtactagtagaaaaacagacacatagaccaatggaacagaataaagaacccaaaaataaatccacatatttatagtcaactgatttttgacaatgacaccccttcaataaatgatactaggaaaactggatatcgatatgcagaagaataaaactagacccctatctctcaccatatagaaaaatcaactcagactgaattaaagacttgaatgtaagacccaaaactataaaactactggtagaaaacataaggaaaaacgcttcaggacattggtccaggcaaagatcttatggctaaaacctcaaaaacacaggcaacaaaaacaaaaatggaaaaatagcactttattaaactaaaaagctcctgcacagcaaaggaaacaacagaatgaaaagacaacctgtagaatgggagaaaatatttgcaaactatccatccatcaagggactagtatccagaacacacaagtgactaaaacaactcaacagcaaaaaagcaaataatctggtttttatatgggcaaaagatctgaataaacattctcaaaggaagacatacaaatgtcactatcattctgccagtaccacactgtcttgattacttgttagtgtataaatttttaaattgggaagtgtgagtcatcctacactttgttcttgtttttcaagtttgttttggctattctgggagccttgcaagtataaaatagccaacaagtatgaaaaaatgctcaccatcactaatcatcagagaaataaaaatcaagaccactatgagatatcctctcactccagttagaatggctactatcaaaaagacaaaatataatggatgctggcaaagatttggagaaaggggaactcctatacactgtgggtagggatgcaaattggtaatggccattatggaaaataatactgaggtttttcaaaaaactgaaaatagaactaccatatgatccagcaaccctactactgggtatttatccaaaggaaagaagtcagtatactgaagaaatatatgcactctcatgttaattgcaacactgttcacaacagccaagacagggaataaatctaaatgtgcatcaacagatgaatggataaagaaaatgtggcatatacactcaatagaatactattcagccattaaagaagaatgaaatcctgtcatcccagcaacatggatgaacctggaggacattatatttaatgaaataagtaaagcacaaaaagataaacagtacatgttctcactcagacatgggtgctaaaaagaaaatggggtcacagaattagaaggggaggcttgggaaaagttaatggataaaaatttacagctatgtaagaagaataagttttagtgttctatagaactgtagggcgagtatagttaccaataacttattgtacatgttcaaaaagctagaagagattttggatgttcccagcacaaaggaatgataaatgtttgtgatgatggatatcctaattaccctgattcaatcattacacattgcatacatgtatcaaattatcactctgtacctcataaatatgtataattattacgtcaacaaaaaaaggaaaaaaaagaaaattaagacaacccacataatggaagaaataaaatatctgcaaattatatatatctgataaatatttaatatttataatatataaagaactcctacaactcaagaacaacaacaaaacaacccaattcaaaaatgggtaaaagccttgaatatacacttatctaaagactatatacaattggccaataaagacacgaaaagatgctcaacatcactagtcatcagggaaatataaatcaaaaccacaatgtagaatgtagacaccacttcatatgcactaggatggctagaataaaaaggtaataacaaatgttggtaaggatgtgaaaaaatcagaaacctcattcgctgctgttgggaatgtaaagtgatgcagccactttggaaaacagtctggcagctcctcaaattattaaatacagagttaccgtatgacccaggaatattcctcctgggtctataaccaaaaaaatgaaaacatatatccacataaaaacttgtacatgggcatttatagcaacattattcataacagcaaaggtggtaagaacccatatgcccatcatctgatgaacaggtaaataacatgcggtattatccatacactagaatattatctgcccatacaaggagtgacatccagctacatgctacaaggatgaatctcggaaaccttatgctaagtgaaagaagccagtcacaaatgaccacagattatgattccatgcatcggaaatgaccagaatagggaaatctatagagacagaaagtagattagtggttgggtggggctgggaggacaggtagtacactactttcccagaactactggaacaaagtaccacaaactggggagcttaaacatagaaattgatttcctcacagttctggagactaggactctgagatcaaggtgtcagcagagctggttctttctgagggccctgaggcaaggctctgtcccaggcctctctccttggctggcaggtggccatcttctccctgcgtcttcacatcatcttttctctgtgtgtgcccatgtccaaattttgattggctcattctgggtcatggccaattgctatgcacaaagtgaagtctacttccaaaagaagggaagagggaacactgactaggctaaacttatagtcattttaatgtccgcttttcctatgagattgtgaacacacagaagtagggtttttatctacattgtgcaaagtttaataagaaaaatagaattcaagagaagcagttcaatagcaggaatttaatatgggaactaattacaaggtttagggcaggactaaaaagccagttgggatggtgagccaacccagagattagcaacagtgggaccccatctacctaccacccatgaagctggaaggataaaggaggggctattatcagagtccacaagccagtgtcagagtccttggctggagctgggaccaccctagagacactgtgcaaagcagaaaacaagggggaaaaaccctgacttctcccttcctcccacctttcaatctcccactagtgcttcctactagccatacttggccagagacagtgacaaggaacactgcaaaatgaagtttgtaggaatcatctccctctgagacagagaaatatggaagggtagaaaatgaatcagaggataaagagaaaaaaccctgagtactatcttatttatctttgtatctccagtgcctaatctgtctctcaaaaaaggaaagcaattgagagaaactgaaaactccaattgaaatgaaagaatggagaattactggactagaagagaagagaaaaatttattccgcatagagtaaacaagaatggattcacaaaggacgtgatgaatgaaaagctataatcagcaaagatttgccagagaaattaaaaagtggtaaactcagccacgctgtacaacctgaaggcacaatgcatgaaaacgtttcaagaaatgacaagatttgaagtcaaattctaagtgcttttccagaatctctcaagacgattatatagctaccccattttattaaataaaatggaaacttactaaactttccccttgtattaaactaacatatgtcctaatagcaaacgattctggaattcctagagtaaaatatatttcgtcaaagtgtattgctcttttaatattctgctgacctccttttgctatttaggatatttgtatacacatcacacgtaaatttggtctatagtttacatctacgggcttatactgttctttttttcatttttttaaaatttccaacccccagtatccatatactgctctctatcagggttattttaactttgtaaaatcagctgagatgctttccatgttttttttttttattttctgccacatttgaatagcataggagttaccaccatcaaccttggattatttaagcattcacgattccacgtgtggattttttattcagagtctttcttgtcattcctgctatcagcacagaacccaatctcagctttccagctatactctcaccccatggaatttgcagatgaagttcaaaaggacctttgcattatcctgcctcgccctcttcccccttcatttagacatcaccttcttctagaacgtcttacctgacatgccctgctcccaacccctgctgcccaattgtgtgctctcccgtgtcctggcctgccatcctctttagtaattgcctgctccctcatctgtctccccacccagacattaagctgaatagactggatttgtgtcttgtccatcactataatctcagcacctagtacctagtaggtacttaccatgtattcattagcaaaatgttatgtataaccttgcaccttaaaaacaagagaaggaagacaaaattaagtcttaagactatggtttagaacatggatcagaaactacagtctgcagcccaaatccagaccaaatgaagagaccatgttcatttacatacaacctatagcagctttcacactacaggagcagagctaagtagttccaagggaacacacggccctgcaaagcctaaaatatttactctatagctcttcacagaaaaagttttcagatccctcgtttagaactcttgttcatatgcaatttcactaaaccatagttttttgggtttgtttggttttttttggcaaaaaggaatgagccgatccagaaaaggttgaaaagaatgaatcattactgctgaaagaatgtgcacacagtccgtcagtattctgctgccatgctgacacccatccaatagtgtcatgagatgcagcagctactactgtgttctcaatgccgagtccacccactccataaccatgtccaagcaatcttgggaacatcatcaccatgcttgtttatccttaaggtattgcctcacatacagcagtggctggtcataaagtcaaatgacactagtggccaggaggtcaagagaatgagtgaggacaggtgggtaggcagcccaggccctagcaacagcaggagctcacccctcagtcactctagccaggactgaaatacttttcaccctttcaagagagactaggaatctggatttttatgtgaaatatcttgattactaaatgttgtcaacagacatgtcaaaaggtaaaactaagtaagttcatggggcagattgactattcaggttatagaattaaggattcttatccaacacagataccaaccaaaaagctgacgtataacatattaggagaaactatgtgcactgtcgaaacatcaacaaggggctaatgtctaaaatagtctatattggattccagttgaaacatggggaaaggacatgaacaggcaacttatgtcaatggaaactcaaaaagataacaagcatatataaaagcattctcaaattcagtagtaaacagacagatgcaaataaaaagagggaaactgctgccgggcacagtggctcacacctgtaatcccagcactttgggaggccgaggcgggcggatcatgaagtcaggagatcgagaccatcctggctaacatggtgaaaccccgtctctactgaaaacacaaaaaattagccaggcgtagtggtgggcaccagtagtcccagctactcaggaggttgaggcaggagaatggcatgaacccaggaggcggagattgcagtgagccgagaccatgccactgcactccagcctgggcgactgagtgaaactccatctcaaaaaatataataataattataattataataataataaatagtaaataaataaaaagagagagactgctaaagtctagaaagttgaatgatgccaagcgcatgcaaagatcagggccttgggatggccgggtgcagtggctcacgcctgtaatcccaccactttgggaggccaaggcgggcggatcatgaggtcaagagatcaagaccatcctggccgacacagtgaaacccggtctctactaaaagtacaaaaaaatatatatatatatatatattattatattatatatatatatatcagagccttgggaatccttgtgtgctgctggggaaggtagtggtgcagccacccttgacagcaatctggcagtacttggttatattaagtataggcacacaccacgaccaggcagtcctactcctgggtctaaatcccaaagaattctcacacaagtccataaggagacatgtacgaggctcattcagcattactgggagtgggaatcaacctgggtgtccatctacaggagacgagatggacaaaatgtggtggatattaagaccagaatcaccaagtaacagagatgggtggtgagtgacaatcctaagatacagaataaaggctagaacatgatgccattcatgtaaattaaaaatagatgcacacaaagcagtatacgcgtgacccttgaatagcacaggtttgaactgcctgtgtccacttacatgtggattttcttccacttctgctacccccaagacagcaagaccaacccctcttcttcctcctccccctcagcctactcaacatgaagatgacaaggatgaagacttttatgataatccaattccaaggaactaatgaaaagtatattttctcttccttatgattttctttatctctagcttacattattctaagaatatggtacataatacacatcacacgcaaaataaatgttaattgactgtttatattatgggtaaggcttccactcaacagtaggctgtcagtagttaagttttgggagtcaaaagttatacacagattttcaactgtgcaggcaatcagttcccctgaccccctcattgttcacgggtcaactgtatatacacaaaagtattatatgaacctcattagaatagctgtctatagggagaagagaatgagagtgggataaaacggaatgaacaaataaaccaacaaatgcattaacaagcaaaacaacagaggggcttgcatgggccagtgatgataaagggctaagaatgagaatataattaattcaattcctcacacctgaggtctaaaaccaaggaaagggagggccaggcgtggaggctcacgcctgtaatcccagcactttgggaggctgaggcgggcggatcacaagattaggagtttgagatcagcctggccaacacagtgaaagcccatctctacaaaaaatacaagaattacccaggtgtggtggcacatgcctgtagttagctactctggaggctgaggcaggagaatcacttgaacccaggaggcggaggttgcagggagccgagatcacaccattgcactccagcctgggtgacagagtaagactctgtctcaaaaaaataaaaaaaataaaaaaacagagaaagggaggaaactagatccaggctgactagatacagcctttagagttagaaaagatgatttgacaatctaagcccacactcagattgaatgaaattgaaaagcctttcaaactaaaacatttaattacaccatctgctgcagacagaactcagacaactcaaacaggtaatgtcagcgtggtgttttatatcaccaccctcaacacagaataaaaatcagctgcatgtgaagcagtgactagaatgaagaaaaggctgcttcttacttccttctagtggttctttccgaaaacattaataggcaccagctctatgcatgtcaccctgcagggagacatggggtatataactatgacttactgttcattcctcaaggaattcccaatcttgtggaagattatacacaatgaggcaacaaaaactatccaataaaaccacggaaaagaagccagtgacaaagaagccagtgatgaaaggccctgtgagcagagctgatggccatttggggaagaaagaccaacatggatgggggtgatcagggtggctccgtgggaaagctggaagagaagtggcagatctctgagctggatgatgggccactaccatctgtatatggctaattaaagaccatgtgtggattttttattcagctctttcgtgtcattcctgctatcagcacagaacccaatctcaactttccagctatattgagctaaacttctcacctcatggaatttgcagataaagttcaaaaggatccttgccttttcaaaataattttgaatggttgagtagtccctctgtgctctctcactgacaccctctcaaggctgctgagcacgtgccatgctatggctttctccaacatcaggaaatgttctccactcagtttcaccttaatacaaatgtgttctctcttcagagaaggcaaaaaaattcatgaccatctgactgggagaagtcatttctaggtaaagtgtccatctttttctgaggaacacaggaggaaaatcttacagaaaagagttaacacagcaggcctaagactgctttttaaaataaataaataaataaataaataaataaataaataaataaataaataaataaatgaatgatagggtcttctgtattggccaggctagtctcaaattcctggcttcaagagatcctcccaccttggtctcccacagtgttgggattatagacatgagccattgtgcttggcccaagactgttattcttaaaaagtctcataaaaagcatggttaatccttggctggcacctgggaacttagatttcagaagggttcccaccatccaacctggaaagagggactcactgtgcctaaattattgtgtggtttatgctgaactcctgcttttcttcaggtagcgtggaatgtggtatgtgctgggcaaagggggcctgcatgaccagcccccaataaaaaccctgggtgttgggtctctagtgagtttccctggtagacagcatttcacatgcgttgtcacagctccttcctcggggagttaagcacatacatcctgtgtgactgcactgggagaggatgcttggaagcttgtgcctggcttcctttggacttggccccatgcacctttccctttgctgattgtgctttgtatcctttcactgtaataaattacagccgtgagtacaccacatgctgagtcttccaagtgaaccaccagatctgagcatggtcctgggggcccccaacacagaaataaattataaaagaccaaggactgggcatggtggcccatgccggtaatctcagcgctttgggaggccgaggcaggaggaccagttaagcccaaaagttcaaagttacagtgacctatgactgcgccaatgcactctaacctgggagacagagcaagaccctgtccccaaaacaataaactaaacacatacttctgccttccaagtgtcttaaaattcaatggaatggtagaaacatttttaaaacactaaatcaaaagaaacctggaaaacaagagtgccgatggccaactaaaatgtctaggaaatttctgaaaagtaaaaagtactcagaaccagattacctgagcaaaccatagcccaatacaagcttgggaggaggctgttatgcagaaggaaatggtaacaggtttccaggaacagacttgtaacagcagatagaacagcagaggtagaacctgacaaggtgattacctggggaactgcagtctgaatgaccaggactgttggacccttcccctcacatggaatacacacgccactcagcagcacaccacagctcttcaacaatcacaggaggcacgctacgcctagtaagacaggaaaaaaggaattctcaaacttcgaagatgaacacataaagaatcaccaagtttttattcagtatgatgaaacagggacactgaatcaacagaacacaaacccaagcaaagataattactagagcacatagaagaaattattagatattcttgggaagacctaaggggacattataaagagcaagcagttggtatgtgacgatctttgtgatataccaagaaataaaaacacaggatgaagaccagatagagaataatgctactatttgtgcaaaaaaggagaaatggagaatctgattcatatttgcttgtatttgcatgaagaaactttggaaggtacataagtaactaacaacaatggttacctacttgtaaggcgagagaagtaagaggacaggaatggtgggaacaccttttgtgtccggaattggtgggttcttggtctgacttggagaatgaagccgtggaccctcgcggtgagcgtaacagttcttaaaggcggtgtgtctggagtttgttccttctgatgtttggatgtgttcggagtttcttccttctggtgggttcgtagtctcgctgactcaggagtgaagctgcagaccttcgcggcgagtgttacagctcttaagggggcgcatctagagttgttcgttcctcctggtgagttcgtggtctcgctagcttcaggagtgaagctgcagaccttcgaggtgtgtgttgcagctcatatagacagtgcagacccaaagagtgagcagtaataagaacgcattccaaacatcaaaaggacaaaccttcagcagcgcggaatgcgaccgcagcacgttaccactcttggctcgggcagcctgcttttattctcttatctggccacacccatatcctgctgattggtccattttacagagagccgactgctccattttacagagaaccgattggtccatttttcagagagctgattggtccattttgacagagtgctgattggtgcgtttacaatccctgagctagacacagggtgctgactggtgtatttacaatcccttagctagacataaaggttctcaagtccccaccagactcaggagcccagctggcttcacccagtggatccggcatcagtgccacaggtggagctgcctgccagtcccgcgccctgcgcccgcactcctcagccctctggtggtcgatgggactgggcgccgtggagcagggggtggtgctgtcagggaggctcgggccgcacaggagcccaggaggtgggggtggctcaggcatggcgggccgcaggtcatgagcgctgccccgcagggaggcagctaaggcccagcgagaaatcgggcacagcagctgctggcccaggtgctaagcccctcactgcctggggccgttggggccggctggccggccgctcccagtgcggggcccgccaagcccacgcccaccgggaactcacgctggcccgcaagcaccgcgtacagccccggttcccgcccgcgcctctccctccacacctccctgcaaagctgagggagctggctccagccttggccagcccagaaaggggctcccacagtgcagcggtgggctgaagggctcctcaagcgcggccagagtgggcactaaggctgaggaggcaccgagagcgagcgaggactgccagcacgctgtcacctctcactttcatttatgcctttttaatacagtctggttttgaacactgattatcttacctattttttttttttttttttgagatggagtcgctctctgtcgcccagactggagtgcagtggtgccatcctggctcactgcaagctccgcctcccgggttcacaccattctcctgcctcaacctcctgagtagctgggactacaggcaatcgccaccacgcccagctaattttttattttattttttttttagtagaagcggagtttcaccatgttagccagatggtctcaatctcctgacctcgtgatccatccgcctcggcctcccaaagtgctgggattacagacgtgagccactgcgccctgcctatcttacctatttcaaaagttaaactttaagaagtagaaacccgtggccaggcgtggtggctcacgcctgtaaccccagcactttgggaggccgaggcgggcggatcacgaggtcaggagatcgagatcatcctggttaacacagtgaaaccccgtcgctactaaaaatacaaaaaattagccgggcgtggtggtgggcaccggcagtcctcgctactggggaggctgaggcaggagaatggcgtgaacctgggaggcagagcttgcagtgagccgagatagtgccattgccttccagcctgggcgacagagcgagactccacctcaaaaaaaaaaaaaaaaaatagagacccggaaagttaaaaatatgataatcaatatttaaaaacactcaagagatgggctaaagagttgacggaacaaatctaaatattagattggtgacctgcaaaaccagcccaaggaacatcccagaatgcagcccataaagataaagagagcatttccgctgggcacagtggtatggcaggggaattgcctgagtccaagagttgcaggtcacattgaaccacaccattgcactccaggcctgggcaacacagcaatactctgtctcaaaaaaaaaaaaaattaaattaaaaaagacagaatatttgagagaaaaaaatgcttatttcaagaaacatgaaagataaatcaagatattctaattcccaagtaagaataattccagaagcagaaaatagaatagaggcaaggaaacactcaaaacttctccagtgccatagaaatgtgtattaatctttagaatgaaacggactaccaaatgctgagcaggaagaacaaaagagatccactcttaagccagtgtggtgcccaagcgcagtggctcatgcctgtaatcccagcactttgggaggccgaggcaggtggatcacctgaggtcaggagtttgagatcagtcaggccaacatggtgaaaccctgtctgtactaaaaatacaaacattagctgggtatggtggtgcacatctgtaatcccaactacttgggaggctaaggcaggagaatcacttgaaaccaggaggtggaggttgtagtgagccgagatcatgccacactcccagcctgggtgacagagcaagattccatctcaaaaaaaaaatccactcctagacaaataatagttaaattttagaacaccaaggagaaagaaaaaaaattgtaaagcttcagagaaaataaacattaactacaaagaaacgagagtcagacgcgtgcacttcttcctagataccagcagataaagcaatatctccaaaattcagaaggttttaacgtagaatcctatacccagtcaagaatattcacatggaaaagtgaaataaaaaacattgtttaaacatgcaagggttcagaaagtttaccattcacagaatccctgaaaacaaaaccaaataatcacttaaggactcattaagaaaacaaatgaaataaaagcaccaatgatgagtaaataatcagaaaaatttacagtttacctaaataactgtttatgcataatgtatgaaaacccaaaaatttaatatgggacagaattaaaatcatgataagattcttttttgctttactcatggagagttcacataaacagattatcttttaatagcaagagaaaaaaatgtttagatatgtgtgaaaaactaagggtaccaaaacagtgcaaattcatttatcatcaggaaaatccaaattaaaaccacagtatccaccagaataactaaaaggtaaaagacagaaattaccaagagttggcaagaatgtggagcaaccacatatacttctggggtaaataagttggtgcaaccggtactgaaaactgtttgctagtatctactaaaaccgagcacatgcacagactacaaccaagcagttccactcccagatacacactcaacagaaatgcacacactcactcaacaaaagacgtgtactagagtgttcatgtacttactattcataatagtccaaaaatgcaaacaaccaactgccaatcaaagtcaaatgtatatctatattagggatatatacaatggcatatacacagcaatgagaatgaaatgaaccagctcggcacagtggttcatgcctgtaatctcagcactttgggcgggtaaggcaggcagatcacttgaggtcagaaatttgagactagcctggccaacacggttaaaacctgtccccactaaaaacacaaaaattagccgggcatagtggttgcaggcctgtaattccagctactcgggaggctgggttgggagaatcgtttgaacccgaaagccggaggtcgcagtgagcggagatcgtgccactgcactccagcctggacgatagagcaagactccgtctcaaaaaaggaaatcaaaaatataaaataagatgacaggaataatccgcaaaagatcagtaatcaaaataaatataaatgggctaaagctacctattaaaagacaaagatttcacacccataaggatagctactatcaaaaaaagagagagaataacagatgttagcaaggatgtatggaaactgaaattctcacgcattgctggtgagaatataaaatggttcagcctctgcggaaaacactatgctgggtcatcaaaaaattaaaaatagaagtactacttgatccaacaattctacttctgggtatatacccaaataactgaaagcagggtcttgaagagatatttgtacacccatgatcatggcagcattattcataatagctatgatgtggaaccaacataaatatcctttgataaatatatggataagcaaaatgtggtgtatacattcaatggaatattaattagcaataaaaatgaagaaaattctgacacatgctacaacatggatgaaccttgagggcattacattaaatgaaataagccagttataaaaagacaaatactatatgaggtactatattagatactcatgcaaggtacctaaaataggcaaattcatagagacaaaaagcagaatggtggttgccaggggctgcggtaatggatacagagcttcaattttgtaagatgaaaaaattctggagattggttgcataacaatgtgcacacacttaacactggggaactgtaaacttaaaagtagtaaatggtaaaaataaaaataataaataataaattttatgttattttaccacaatatttattaaaagacaaagattaactaattaaacaaaatccagccataagctaatggtaagagtaacaattaaagaagacacagaaaattgaaaatcagtgactagaaaaagatattccatataaatgctaacaaaaagcaagtacagcaatataaagagaatgaacaaaaaaaaaattaaataagatggctcgtttattcccaaaaggtacaattcaccaagaagatacaagaattgtgaacctttaagcacataaaacagcttcaaaaatacaacatttaaagaaaaatatatattaaacatagaaatagtacaaaaacccctacaagaatcataatgggagtcttcaatacaactctccatatcaacaggtcaaacagagaaaaaaaataagttaaggatgcagaaaacctgaattaccatcaataaacttgagattaatatagaactgtatacccaatatactaagagttcagggaacagtcgtgactgacagtggactgcaaattaatctgttcttaatctttgtttttctttcagcactgtggcagaatagagatcctaaaaaccttccagctacaaaacatctttttaaaaatataaaaaaatacaaaaataactctgaaatcaatagaagacacatggtgaaaccaaaattctagaatacagggagaataaaggcattttcagatattacaaaaacagaaaattgatcattgctgaagtaatttctaaagaatgtacttgagggagaagaaaaatgttccaaagaaaagtatctgtgatacaagaaggaatggaaagtgaagaaatggtaaacaggtagataaagctaataaatgttgacctagaaaataacaaaaacaatagcaataatgtctcgttggaagggttgaagtaaaaatacaattaaggccaaatgtgaggtaagtggaatgaaagaattagaagtccttgccttgttcacaggactgattaaataaatgagccaggttttccattcaaacagttaaaacttgaacaaaataaactcaaattaagtagaaagataaaaaacagaaattaatgtcatagaaaaataaaaaatcaatagaattaatcaataaatcctggttaataaaagctggttctttgaaaggattaataaaataatcattaagcaagtctgatcaaaaaaaaagagaaaaggtaccaaaaaaagtactgtatcagaaagagaacatacagatacatacagatatgtaagagtctgttttcttacaccagaatactatatacaacattatgctagcatatattaaatttcaataatgttaatgattttctaggaaaacagaaaatattaaatttactttgaagaaacagaaaaactgagaaaaataaatgatcatgaaaaaaatgaaaaggtaattaaatactgatattaactgcctaaacaacaccagcagcagcccaggcagtctgcagtcaagttctgccaaacttgagggaacagataattcttctattccagagcatagaaaatgatggaaagtttcccaatttaatcagagaggacagcctgatccttgttatgaacacagataaaaatggggtaaactatatgccaaactcagataccaaaaccctaaataagatgctagcttattgatgtgaacaatccaaaagtgcattttaaattagcccagggttttagagaaagaaaatctagcaatgtgaccaccacttatgttaacaattttaagacgaaaatctacatgatcatatcaatgcatgctacacaaaagcatttgggcaaaaaacccaacacccacccttgactttttaaactcttagtaattaggcataaacagaaatgtacttaatgtgatagaatacactcggtgaagatacagagggaatgctccctaaaaccaagcccaagacaaagattcctatttaacctcaatagtcaacactgcagcgagagtaatctatggaagacaaggaaaaaagtaaaaacatgagagacatctgttgtttaacagacaataagatcacctacttggaagaggcaaacgaatcaagcgaaaaactattaaaactgagacaggctttagtatggaggctcagcttcagctgtagtttgggctaccaaattcaactcgcttgcttggagagttaatcctgcaaagctaatttctgttgaggtattaggattgacaagcctgtgctcctccctcctcccccatcttcaacactgaaataacacggtgtttggaactggataacagaatcttccaaaaacaaaaattgtcctgaagggctgacttgtgcccttactcaaaaaacactttatctgctgcctgcagctcctacagttgctggtggataagcctgccaaccagctcggcgtaattcttcctgcagagggcaaggaagagcactttcacaggaaaatttttttccgaactgtatgccgcttattacataaacttacgtgctggcaaatggagctccagcaaaataagatattcagagtcaaacttccttaggaaaaaaaaaaaaaaaaagcaagcacataacactaatttccttgcatgggcactggggaaggaggtcgttacttccgcacgcccgcaggtccgcaccaccgggaaacccacgggcaccgcgcgctgcccccgggccttccaggtgcactgcgccgcggcgccccagctgacccgggatgcgcagccctagcccttcccctgtcaccccggccaggaaggggcgggagcgcggcggacgccgagggcgaagggcttctcggtcctctgcaccacgcagcacccccaaggcacaacagggagggtgcgggaggctcccgagacccaggagccggggccgggcgtgcccgcgcacctgtcccactgcggcgagggctggggtcgcctccagggccgcagctgtcgggagccacctggctctcagtcccgggtccctgcgacaaccctcgggcccggaggggaggaggcggccacctgccgctgccacctgcggcaccggtcccaccgctccgggccgggcaggacaggccaggacgtccctcctgggctggggacaggacacgcgacgaggggaccggggcccccgcggcgaagacgcagcacgccttcccagaaaggcagtcccgtgcccccacgacggactgccggacccccgcgctcgcccgcccatcccttcagaccacgcggctgaggcgcaaagagccggccggcgggcgggctggcggcgcggctagtactcaccggccccgctggctcagcgccgccgcaacccccagcggccacggctccgggcgctcactgatgctcaggagagggacccgcgctccgccggcgcctccagccatcgccgccagggggcgagcgcgagccgcgcggggctcgctgggagatgtagtacccggaccgccgcctgcgccgtcctccttcagccggcggccgggggccccctctctcccagctctcagtgtctcatctccctatctgctcatcctctggtcgcacataatcgatgtttgggcgtcccaagccagatgtggaccccatttccgcactctacactggaggttttctaagggtggtgcccggaccagcagcttcagcctcatctgggaacttgagaaaatgcagattctccgtcccacccagcctattcggtttttcctgcactaaaaccatgaaggtggggcccagcagtccacattctcgcaagcccgtcaagtgattctgaggcgccctccagtttgagagctatgctcacggcctcacctccgccccgcaaggagcccggtcttgcctgtggcgctagccgcacacggacacctcatcctgcggggcccgcccccccgctgcaccctcaccgcccaacgcctcctccgggatgcagcggaggcgcctggaagtcggcaaggtcaacatccccctcagcatcttccctaccctcacggctcctcctccaggggtgcctcatggccaggggttagaaagagccactgtgtttcttgacatggaagtggcctaagaccttaatgaaaactgcaggagtggaatgacagaacctttggtcatacttgagggcgtgaagctcaaatgaggaggaaggaaaggatccagggagaataaccaaccctggcaagttgtggcgcccaggtagaggggcgagcctaggctagcggttctcgaccagggccggtgttgcccctcctcgccgccccgcgtacatttggggaggtctggagacatttttggttgtcatgatgcgggagttgctactgttgcctaagtgggtagacacgagggtgctcctcaacatcctacctgaaggacaggactgccccacaaggaagaatgatccggccccaaataagaaaccctgggctggtcagcaacaacccctttgttctgagaagagaggaggaaagaataaaagaagtggggtgaagttttggtttggtagaggaaacttgaagacattttcactggaaaggaagagaggaagaggagggagatgtctgtaaggacgagcaaaccgggtgacagctgatttcctcatattgaagtaatgagtcctagttataataaattcctaataaaaacccagtttatccctgcaataaacttgtcttttttttttaaatatactgcttgattctgtttgctaatattttatttacaggctttgcattgatatgcaaaaatgagatgggcaataattttctttttgaatgtctaatgttgtttggtttcagaatcaatgttatgctcacatcataaaaaatttggaaccgaggcaggaggagtgcttgaggccagaagttcgagaccagtctaggaaacacagtgagacccccccatctctacaaaaaaaaaaaaagaaaaaaaaatgggcatgtttgctttttccttttactctgaacaatttaaggagcattaaaattatctattctttgaggtttgatcatttcccagttaaaaatgttcctcccagcctgatgctttctttggggagggtaaatcttttaaggctagaaaagtttcttctgtggcaattttattatttacattttaaaaattattctagagttaattttgataaagcatgtatttcttaaaacaaattatcctttttttccagatgttcaagtgtatttgcataaagttgaggaaagtagtcttttgtgaatcttttaacttctcccaaatatcttattttgtgtatttttgcttctttattttgttaacttttaaaagtgtatttttttttcaaagaatcagctcttaggtttatgtttttggttatactggagcttttttcttcttctttttaaaatattttttctcctttattttttagacgtattttgatctaacgtaatcggaagaaggtaaattagaatcttttgttactattgtgtttttatttctccttatttctctgaagtcctgctttataaatagtaccatgttatttgtgcataaatattcatttgtcttatattcttgggaattttcccacttcatcataaaatgaccttccttgtctcatttaatgtgttcaaactttgccctgaatttaactttgtctgatattttaccatcctgctgaattttgtttgttaccccaaacaacctttgctgttttcgtcttttctgaaccctttattttaggtaatcccttgaattagagcactaagttttgctttgtgattaaatctgaaaatctttatcttgccatagatgagttgagccctattcatgtgacagctatattatgctgtttcatagcccttttggtccttttttcactcttgcattgcatattttgtgtttattgtgttttgtgtttcttctgataatttggaaggtttgtatttttattcagggagttgccttataatcatactccgcaatacacatcgtcctcagtttcttcagactgtctgttaactccctattctgaataaaaatgacattgtaatttccctcttttttctttaccccttttcttctcctcacctaatgtaaatgattttatccttctttagtatttgcttttttaattaactacatttataaatatctttatcacttgatttttaaatcagctttgaatgagatatttggattcctagatataaaagatgttaattataccatttccacgttagtaggtttataaaatcatacattctgctgtgtaaccataatcccacgtttgttttagttccactcctacagttaaaagattcagaagtattattaacagttattttgccatagttttttccccaacccattttgtggtaagttatgatcctgctttagtttcttaagaataatttatagagcagagtgtggtggctcacgtttgtaatcccagcactttgggagacaagaggtagaaggatcgcttgaagccagcagttcaagaccaccctgagcaacatagtgagaccttgtctctacaaaaaattttaaaatttagccagacgtagtggcgtgtgcctatagtcccagctactcaggaggctgaggcaagaggattgctagagcccagaagtttgaggctgcagtgacctctgattgtgccactgcaccccagtctgggcaagaaagtgagaacctatctctttaaaataacaataataacttatgaaaattatattccctgagtttttcatgtttaaaaatatttgttgcctttatcctgtaaaagtttgagtataaattcttgggttatactttatttattgaagaatgtataagtattgtcttctagaattgagtgttgctgtaatgaaaccagaagtcagcctggtttatttttcctcagaaatgaggtaattgccggccggacaccgtggctcatgcctgtaatcccaacactttgggaggccgagacaggtggatcacgaggtcaggagattgagaccatcctggctaacatggtgaaaccccggctctactaaaagtacaaaaagttagctgggcatggtggtggacgcctgtaatcccagctacccgggaggctgaggcaggagaatggcgtgaacctgggaggaggagcttgcagagagctgagatcgcgccactgcactccagcctgggcgacagagtgagactccgtctcaaaaaaacaaaaaaaaaacaaagaagtgaagtaattgccatgatgctccaagaattatctctttgtctatgaaatccagaaatctcactgttatacattttggaattattattctgggccaatatttcctgggacacaatagattgactctatagatttaattttttttttttttttgagacagagtctcactgcaatctcagcttactgcaacctctgcctcacgggttcaagcaattctcctgcctcagcctcccaagtagctgggactacaggcgcgtggcaccatgcctggctaatttttgtctttttagtagagacagggtttcaccatgttggccaggctggtcttgaacgcctaacctcaagtgatccacctgcctcagcctcccaaagtgctgggattacaggcgtgagccaccatgcccagcctcaattcctctttctatctggtaatttttctgaagttgaaaacatttgttctaatacgttatttcagtgttcttctaagatgtgtaaagcaccctattcccaggtcagcccccatcttgctagtgagctcggctggttcttcacaagagctctggttttctcctgcttaatctcaagtacctctgtcagcctccacctggtttatgatttggagttttttggtttttgttttttgtttttgacagagtcttactctgtcacccaggctggagagcagtggcataatctcagctcactgcaacctctgtctcccaggtttgagcgattctcctgcctcagcctactgagtagctgggattacaggcgcgtgccaccacacccggctaatttttgtatttttagtagagatggggtttcaccatgttggccagggtggtcttgaactcctgacctcaggtaatccacctgcctcagcctcccaaagtgctgagattacaggcgtgagccaccgcgcctggcatggtttggagttttaatctgtagttttaataaagatagtgcttatgtttgtgtttcttatatttcttggtactcttgggtaatttgtaagatccccatatctacacaagaagtccattttcaattcttttcttcagactgtttattttattttattttattttatttttatgtttgagatggagtctcgctgtgtcacttctggaggctggagtgcagtggcgcgatctcaggtcactgcaacctccgtctcccgggttcaagcaattctcctgcctcagcctcccgagtagctgggattacaggcacctgccactttttaatttttttagagacagagtctcgctttgttgaccaggctggagtgcggtggtgcaatcatggctgactataacctccaaatcctgggctcaagtgatcctcctgcctcagcctcctgagtagctgggactacaggcacatgccaccatgcccagttaattttaatttttttgtagagacagggtctccatatgttgcccaggctggcctcctactcctggcctcaagtaatcctcctacctcagcctcccaaattactaggattataagcatgagccaccatgcccagccttgttctactactttaatttcatatgttaggtgaccatgtaattgatcatccaaaccaggatactgtaagaatgaaagaggctgacagtagtatgatgctgggactagcattgtgcactgagattatttctgggaaagcaggagatacggtcaccctacttatagtgtgcttgtctttggattgttgaatttggagtttctatttgcaggcttatttcaactgggcagccttgatccgccctgcccagcaatgctaccgttctctccaccgggtctctgggaccccttcagtcactatacttagctcagttccccaccctcccactccctaaaagcgtaaccaggaatcctgcctcaggtctactgccgtcttccgtgggctgtttcagttcctattacccagagtcaaactcccagcattccctacctgattccagacttggagtccagagctttaacctcttcaggccaactccccactttgcatttctgtccctatatcttagtccatggagatacatttcatgtctttgagtctacttacaaagtaaattttgctgttttttaattttttttttgagatggagtcttgccctgtcacccaggctgtggtgcaatgacgccatctcggctcactgcaacctccgcctcctgggttcaagcgattcatctgcctcagcctcccaagtagctgtgattacagacaggcaccaccacgcccagctaattttttttatcttttagtagagacagggtttcaccatgttggccaggctggtcttgaattcctgacctcgtgatctgcccatctcggcctcccaaagtgctgagattacaggcgtgagccactgtgcccagccaattttgctttttttatatttcattgctatatgtttagaggataagtttacagtgctatatgcattcccaaatattagaccaaaaaaatctccaaaaaattagaaagaaaatccaaaaaatctcaaaaaataccaaaaagcaacaatctcacagaccatactcactgacccccaataaaataaaattagaaattaaccacaacttaacaaaataaagtactcaagtcagagaggaaagaggaaataaacatcaaaattacaaagtctaggcggtggctcacgcctgtaatcccagcactttgggaggccaaggcgggcagatcacaaggtcaggaattcgagaccagcctggccaatatggtgaaaccccgtttccactaaaaatacaaaaattagccaggcatagtgatgtgtgcctgtaatccagccacttgggaggctgaggcaggagaatcactgaacccagggagacgaagattgcagtgagccaaaatcgtgccactgcacttcggcctgggtgacaaagcgagactccatctcaaaaaaaaaaaaattacaaactctttagatagaaattttggtgtttttttttgagacggagtctcactctgtcgcagaggctggagtgcagtgggactatgtcagctcaccgcaacctccatctcctggattcaagcaattctcctgtctcagcctcccaagtagctaggattacaggcgcccaccaccagacccagctagtttttatatttttagtagagatggtgtttcaccatgttggccaggctggtctcaaactcctgacctcaagtgatccacctgcttcagcctcccaaagtgctcagattacaggcgtgagccaccgcaccccacctagatagaaatttcaacatgaggccgggcacaatggctcacgcctgtaatctcagcacttcaggaggctgaggcgtgggaggatcacttgggcccaggagttcaggaccagcatgggtgacagagacagaccctgtctctatttatttgaaaaaaaaaaaaaaaaagagagagagaaagaaatttcaacatgaaaagtatctctcaaacccttcgagatgttggcaaaaagcgactcaaaggaaaatgtattactgtgtgtgaatttgcttgaaaataagaaagaggccgggtgtggtggctaacacctgtaatcccaacactctgggagtccgaatcaagtggatcatgaggtcaggagatcgagaccatcctggctaacatggtgaaaccctgtctctactaaaaatacaaaaaattagctaggcgcggtggctcatgcctgtaatcccagcactttgggaggctgaggcaggtggatcacctgaggtcaggggtttgagaccagcctggcctacatggtgaaacctcgtctcttctacaaatacaaaaattagctgggcgtggtggtgggtgcctgtaatcccagctactcagaggctgaggcaggagaatcgcttgaacccgggaggcggaggttgcggtgagccgagatcgcaccactacactccagcctgggcaacagcctgggtgacacagtgagactccatctcaaaaaatacaaaaaattagctgggtgtggtggcctgcgcctgtagtcccagctacccgggaggctgaggcaggagaatggagtgaacctgggaggaggagcttgcagtgagccgagatcccaccactgcactccagcctgggcgacagagcaagactcttgtctcaaaaaaaagaaaaaaaaaggaaaaaagaaccctgataataaagaaaccaaatgttcaactctcaaagctcggacactttaaagaaataattaataaaggcagaagttaaagggaggatgataaagcaattttttttgttggtttttttgagatggagtcttgctctgtcacccaggctggagtgcagtgatgcgatcttggctcactgcaacctctgcctcccgggttcaagcaattctcctgcctcagcctcctgagtagctggtactacaggtgcgcgccacctggcccagctaatttttgtatttttattagagacggggtttcaccatatttgttaggctggtctcaaactcctgatctcaggtaatctgcccacctcggcctctcaaagtgctgggattacaggcaggcgccaccgcgcctggcctaaagcaaaatattggttctgtgcaaaaggtcaataaaaagagcaaacgtttacaaactggagccagcacccattcagctcagtgtgtctggagaaaaaacaatctcgcttcagaattcatgattacgcagccctttttgcttcctaaaaatcctactatgttgctgttgaccattctctctctttctctctctcttgctttctctccagaaaagctattcagacattctcctctttcctcaaacctccaacacttcctcctccatccttagcctcagctgctgacctcacttctaatcattgagaaaccaggagaagcatttaagagtgaacctccgcctccccgcacgggcaaaaccacccacccacagaattgtgccccaattctgcgtcctctcctctcaccatggatggacggtccaggctccgagccaaagccaggcctcccctggagctctggatccaccacctgcagcttctcaggcagggccccagcagctcccctgctcccttgtaccatcaatccctcccctcactgggtcactcccaacaatatatatatttagtgatgtttctcccatgtggtaaaatcacttagcctctctcctcccccagctactatcctatttgtttctttccattctctgcaaaacttctcaaagcattgtgtctatgtgctgactccatttatcttctcccgttctctgctgagtccttcccacagactctcaccccagttactccatgaaatgacctctgcactgccacatccaatggtgaatgttcagttcttaattttattcagtctttcagcagcatttgacctggccgatcactccctcttcttaaaaatacttttctcagccaggcgtgatggctcacacctgtaatcccaacactttgggaggccaaggcgggaggatcatgagagcccaggagttcaagatcagcctgggcaacatggcaagaccctatctctacaaaaactaaaaagtagccagtgtgatggcatgcacctgtagtcccatctacttaggaggctgaggcagtaggatgacttgagcctgggaaatcaaggctgcagtgagccatgattgcaccactgcactccagcctgagtgacagcgagaccctgtctcaaaaagacaaaataggaaacttttctcagcatattcctctgattctcctgctgcttctgtctgcacagattcagtctcctttgccggttcttcctcatcctcctgatctcttgaccttgaagtgccccagagtacagtctttttttttttttttgagacgcagtctcgtctgtcacccaagctggagtgcaatggcgaggtctcagctcatgcaacctctgcctcctgggttcaagcgattctcctgcctcagcctcccaagtagccaggactacaggcacatgccaccatgcccagcaaattgttgtatttttagtagagacagggttttactatattggccacgctggtctcaaactcctgaactcgtgaaccacccgcctcggcctcccaaagtgctgagattacaggcatgagccaccacacccggcccagagtacagtctttagacggcctctctacctatacttgctcccctcataaactcctcctgcctcatggctttaaataccatcggtagactgatgactcccatatttctcttttttttttggagacggagtctcgctcagtcccccaggctggagtgcagtggcgcgatctcggctcactgcaagctccacctgccaagttcacaccattctcctacctcagcctctccagtagctgggactacaggcacccgccaccacgcctggctaatttttttgtatttttagtagagatggggtttcaccatgttagccaggatggtctcgatctcctgacctcgtgatccgcccatctcggcctcccaaagtgctgggattataggtgtgagccaccgtgcccagccgatgactcccatatttctatctcttgctgtgtgggagttctcctcagaactccatactcataaatccaactctcataaatagtatctcaaatgggcaatatgctcaaaagtcaattcctacttttctccctaaacttgctttcctgcagtctccaccatcttaatgtccaatctaacattaggaggcaaaaactttgaagtcattcttgactcttctctattacacaccctatccaatctttctgcagatccagtcgacccccaaatccagttagctctcatcatctcccctgttaccccctggtccaggccatcttcctctctcacctgaatcactgcagcattctcctcactggtctctttggttctgttttcactccaccttagcatagtctccacagagcagtcagagggatccttttaaagtgtaattcccatcctgtccctgctctgctcaaaaccctgtcgtgattcccgttttaatctgtcagattaaaagccagagtctttccagtgacctacatgatctgcctattatcacctcccacttctttccccttgctcactccactccagctctgcagctgtcctttctgtttcctgaacagcccagattttgcttctttagaacctttgtatttgctgtcccctctgtctggaatgtttttccaggaagtcacctggctctctcctgcacttccttcctgaccaccatgtttaaaaatcactcaaacacacttcaggccggacatggtggctcacgcctgtaatcccagcactttgggaggccaaggtgggtggatcacctgaggtcaggagttcgagaccagcctggccaacatggtgaaacttcgtctctactacaaatacaaatagtagccaggtgtagtggcacacacctgtaatctcagctactcaggaggctgaggcaggagaatcgcttgaacccagaaggcagaggaggtgcagtgagccaagatcacgccacaacaccccagcctgggtgacagagcaagaccccatctcaaaaaaaaaaaaagaaaaaaaaatcacacaaacacacttctcttcatattccttttccaagttttatttttctccagaatactttacattgttttaatggaagttctccgtttccccccaactagaatggatacttcctgcaggtaggcactctagtcctcccatccaagtactaaccaggctcaaccctgcttagcttctgagagcaggggagatcaggcctgttcagggtggtatggcccaggaattttgattctgttttattcattgctgttctgttgattctcttttgttcctcctcctagtgctgagaacactacttgtacataataagcattcaataaatatttgttgaatgaatgacttgttgaatgaattaatctcagaaatgcaggactggttctacattagaaaatttttcaaggtcattctctgttgtcgtaacacattaagagaggaaaattttgtactctaaatcatttgataaaatacatactgatttctgttttcaaaaactcttagtggctgggcgaggtggctcacatctataatcccagcattttgggaggacgaggtgggcggatcacttgaggtcaggagtttgagaccagcctggccatcatggtgaaaccctatctctactgaaaatagaaaaattagccgggtgtggtggcgcatgcctgtagtcccagctacctgggaggctgaggcaggagaatggcttgaacccgggaggcggaggttgcagtgagccaagatcatgccattgcactccagcctgggtaacagagtgagactccatctcaaaagaaaactcttagtgagtttaggaatccaaggaagaccctcaaactaaatagataatctagctaccagaagccttcagtaaaccttaacactccatggtgaaacattagaaacattcctactaaaagacaggctaagaatgcctgcaatcttcacggctagtccaagaagtcaaaaagaagaaatgagcgctgatttaaaaaaataaacaaacaaaaaactaccgatgcagaggctggcagcaaggactgaaggactgtacagtacttgcctggagcaggcggatggccacacccctgcgaagcctgctcagctggctgggggacgctccagtgtgtgagtggcaggatgcagggtacttcctctgccagggagttgcactggggagatcctcccccactcacactttggcagctggggctttggaatgtgacttagcttctgtcaaagggtcaatccaccctttgatatatgatgcaaaggcgaacatatgatgcaaaggtgagagaacagcccaaattaggacttttaccacagctgtggaggtggacagcgacagtggtgggccctggccagacttttcatgctcaaaggtggtggttgttcttcctacttcttgtccctccagggcttcctttgcctgtgtgctgaacctgcttcttttaattttttttaacttttttaaatttttaattgttttaattaaaacaaattttgaaaactgtctgaacctgcttttgaaccctgctatgatttgaatgtttgtcccctgccaaactgattttgaaacttaatctccaaagtggcaatattgagatggggctttaagcagtgactggatcatgagagctctgacctcatgagtggattaatggattaatgagttgtcatgggagtggcatcagtggctttataagaggaagaattaagacctgagctagcatggtcgccccttcaccatttgatatcttacactgcctaggggctctgcagagagtccccaccaacaagaaggctctcaccagatacagctcctcaaccttgtacttctcagcctctgtaactgtaagaaataaatgccttttctttatgaattacccagtttcagatattctgttataaacaatagaaaacgaactaaggcaaactctcatgattctactgccatgccattccaataaactccctttatgcttaagagagccagagttggccaggcgtggtgactcacgcctgtaattccagcactttgggaggccgaggcaggtggatcacaaggtcaggagatcgagaccatcctggctaacacggtgaaaccccgtctctactaaaaatacaaaaaaattagctgggcgtggtagtgggtgcctgtagtcccagctactcgggaggctgaagcaggaggagaatggcgtggacccaggaggcggagcttgcagtgagtcgagatcgtgccactgcactccagcctgggtgacagaatgagactccgtctcaaaaaaaaagagagccagagtttatttctgttgcttgcaaccaagaaatctggctggtgcactgaagtttccataaataatagcaatttaaagactctttccaagccaggcaatgcctagccttgtgtagtccttgtggtaatacattcattcattcatttgttcaaccaactgtgctccagagactaagaatacaaaaatgggggccgggtgtggtggctcacacctataatcctagcactttgggaggccgaggcaggtagatcacctgaggtcaggagttcgagaccaacctggccaaaatggtgaaacccctactctactaaaaatacaaaaaattagctgggggtggtggcggacacctgtaatcccagctactcgtgagactgaggcaggagaatcacttgaacccgggaggcagaggttgcagtgagccgagatcgcaccactgcactccagcctgggcaacaagagcgaaactccacctcgaaaaaaaaaaaaaaaaaaaaagagggccggggctgggcgcagtggctcacgcctgtaatcccagcactctgggaggccaaggcaggagaattacgaggtcagcagatcgagaccagcctgaccaacatggtgaaaccccatctctactaaaaatacaaaaattatccgggcgtggtggcgcacacctctagtcccagctacttgggaggctgaggcaggagaatcgcttgaacccgggaggcagaggttgcagtgagccgaaatcatgccactgcactccagcctgggtgacagagtgagactccgtctcaaaaaaaaaataaaaaaaaaaaaagaattcaaaaattgtagagttatagtgtgcttctagtttagttgagaggacatctgtccttcaaggaaggctagaatctataccctgagtccttactgaaatcaatccagcagtcaaaacatgggaccaacgatcacagcagtaagataggaagagcacctttgtacatttagctcatgttgagataagccactgacagagctgaaggaagctcacagttctgggttccatcctttggcatttaaaaagaaaagtgctaagaaaattcggttggtcacggtggctcacgcctgtaatcccaacactttgagaggccaaggcaggcagatcacgaggtcaggagttcgaaaccagcctggccaacatggtgaaaccccgtctctactaaaaacagaaaaattagccgggcatggtggcgcatgcctataatcccagctactcaggaggctgaggcaggagaattgcttgaacccgggagggggaggttgcagcgagtgagagcaggccactgcactccagcctgggagacagagcaagactctgtctcaaaaaaaaaaaagaaaaaaagaaagaaaggaaaaaaagaaagaaaaaaaaagaaaaaagaaaattcaggccaggccaggcctggtggctcacacctgtaatcccaacactttgggaggctgaagcgagacggtgccttagcccaggagtttgagaccagcctgagcaacatagcgagaccctgtctctataaaaaaaaatttttttttggccagacgcagtggctcacgcctgtaatcccagcactttgggaggccgaggcaggtggatcacgaggtcaggagatggagaccatcctggctaacacggtgaaaccccatctctactaaaaaatacaaaaaattaaccgggcgtggtggcgggcgcctgtagtcccagctactcgggaggctgaggcaggagaatggcgtgaacccgggaggcggagcttgcagtgagccgagattgcgccactgcactccagactgggagagagtgagactccgtctcaaaaaaaaaaaaaaaaaaaaaaaattaattgtcaggtgtgctggcatgcagctgtagtcctagctactcgggaggctgaggtaagaagatcgcttgagcccaggagttcaaggctgcagtaatagtgcctctcactctaccctgggtgacaatgagaccctctctcaaaaagaaagaaaaaagggaaagaagaaaagaaagaaagaaagagaagaaaggaaggaagaaagaaagaaaaagaaaaggaaggaaggaagaagaaaaaaaaagaaagaaagaaaagagagagaagttcaaagaccaaagggtcaggatcccaaaatagtttttatgttttatttatttatttacttatttatttttgagacagtatggctctgtcgcccaggctggagtgcagtgatgcgattgcggctcactgcagcctccaaactgggctcaggtggccctcccacctcagcctcccgagtagctgggaccacaggcgcgtgccaccatgcccagctaattttttaattctttgtagagatgaggtctctatatgctgcccaggctggtctcgagctcctgggcttaagccatccacccgcctgggcctcccaaagtgctgggattacagaagtgagccaccgcgcctaatcgggtggtttgtttgtttattgacggggtctcgctgctgcccaggctggagtgccagtggctgttcacaggtgcagtcctggagcattgcatcagctcttgggctctagcgatcctccagagtagctgcagctgggattccaggcgcgccaccgcgcggggctcagaatgggtttttatattgagggttatgctgccacctagaggatatatgtagtaccgaactgtgtgcgcagggaggctgaggttgcagtgagccaagatgatgccagggcactccagcgtgggtgacagagcaagatttcatctcaaaaaaaaaaaaaaaaaaaaaaaaaaaagaattgaaagtaaggtcttgaagagatatttgtgcctgtatggtcatagcagtattaactttgacccactagctaaaacacaaaagcaacatgtgtctgtcagcaggtgaacggataaacaaaatgtggtatatatgtacaattgaatattattcagcctttaaaaaggaataaaaggctggatgcgggggctcacgcctgtaatcctaacactttgggagactgaggtgggtggatcacccgaggttaggagtttgagaacagcctggccaacatggtgaaacttcatctctactaaaaatactaaaattagccgggcatggtggcacttgtctgtaatccaagctactggggaggctaaggcaggagaattgcttgaactcaggagccggaggttgcagtgagctaagatggcaccactgcactccagcctgggcaacagagtgagactccatctcaaaacaaacaaacaaaaaattattatttccaaagaaacaagaccctgggtccatttcccagcccacacctgatgttgactcacaacacacagcctggtttgctatgagcctgcttcatttaattgtcaccttaacttcacatcaccctcaagtcctggaataactctttgctgacctttgtgtgctgagccatctccatgtcgctcaacgtgcagtccctctcactgcactgagtcaatagccagacgtggtctgactgcagggtcatccttggtggcttaggctgactcgggcatagcagggtgctctgagacctcaccgcatataggctttgcccccaataaactctatataatattcatattatgtggtctgggtgtgtgtagctttgcactgtcttctcgtgacagtgccctcaacctctttcccaggatttcctcctctacctcctcaagtcccactgctctgcaaagaccaaaagctgcagagtcccagctccctcctttacaccccacgacgcagcctcctctctcagaaccctttaaacagagtcttttactgcagatcccaagaacagccacacccctctctcccacccactccagacacacccaggtaattatagcacccagggtaactatgtagatggagtccctggaacatgtggatagtgccccctgggagtatgcaaaagcaacattgctggcacctgcagagaacagggtgacatccaggaatcagagcatgggcctctgggaggtagggatgtggccaggcaggctgccaaaaattggtagagcaaggccacaggatctttctgaccttccttccaaacagaggctcctgtactggtgatccctgtgttgattgaccactcccttcctgggggtcgtggtctctgtcccagttgcccggacttctgtgagtgtcctactgaggtccttttcatgagaagcatgctgtccttccacctgctgggagcaagagtgacaacttcaatactataatagcagtggcatacagagaagaagaaagatgaagtggcaagaaaaacaggcttccaagcaggagtttttctataaaaacaaaaacgtttacaagcaaactttttataaagggctagatagtaaatattttaggctttgagagccacatagacttgtttgcagggactcaatgtcgctattgtagtttgaaagcagccatcagggttatgtaaatgagtgagtctgattttgtttcagcaaaattttatttaccaaaacagacaatgagtgggctggatttggcccatgatccttagtttgccaactcctgctttgggctcacccagatctgattttgaattctggctctgctactggttagctgcaggagcttggaaggctctctgagcctgtttcctcatctgtaaaattaaagcaataatttctaacactcaagagtgttacctcacgcctgtaatcccagcactttggaggctgaggcaggcggatcacctgaggtcagaagttcaagaccagcgtggccaacgtggcaaaaccctgtctctactaaaaaatacaaaaagtagccgggcatggtggcgcgcatctgtaatcccagctacttgggaggctgaggcagggatactgctagaacctgggaggtggagcgtgcagtgagtggagatcacacctccacactccagcctggccgacagagcgagactccatctcaaaaaaaaaaaaaaaaagagtgttagaaggttttgagataatgaataaaagatgccttgtgtatactaagtattcaacaactgatagctgcattggtctaattataacagtttagaagcgattgagtcaacaaatgctggatttgtcagggaggacttcctatcaggaggtagatcttgggctgagtcctgaagcaaagataggcattggatagaggagttgagagaacaccctaggactgttattattattattcgacacggagtctcttgctctgtcacccaggctggagtgcagtggcgcgatctcggctcactgcaacctctgcctcccaggttcaagcgattctcctgcctcctaagtagctgagactacaggtgtgtgccaccacacccggctaatttttatatttttagtagagacagagtttcaccatgttggccatgctggtctcgaactcctgacttcaggtgatccacccgcctcagcctcccaaagtgctggaataacagatgtgagccaccgcacccagcccagaaccatttttcaatccttggctctgccttttattagctgcaagatctcaggcaatttatttaacctctccaaagactcattttctcattcacaaaatgaggcaaataataatatctactatcccaggttgtcatgagaattaaatgcaacatgacatttaatgaaatgagaagtcccttggacattaactggctaaagtatgtgctcgacaaggatatcattttaggtggatacttagcatctcagaactgatgctcacaatggaatatcattgaaacgcattaaaattcattttaaatgattgtaggtagtgaggcaattgaaagaagaagacaagaggactgattataatgcttcaggctcactagtctccttttaggagggaaaaacaatttcaagttaaattttaggctctagatttttacccctgctgctcattagaatcacccagattgatgaaatcagagcccatctgaggctgtgtttttcatctccagaatgagagctgttgtggggattaagtttttgaaaaagtacatctaacaggtgatcgaaaatgatagtgatattattgcagtgatggtcattattgttgttattattatactgaaagaggcttcagttttctgatccataaagtgagggaattgcatgagaccattgctaagattccttctagctctgtttttttgtttttgttttttagacagagtctctgtcgcccaggctggagtgcaatggcatgatcttggctcactgcaacctccgcctcccgggttcaaatgatcctcctgtctcagcctccgaagtagctgggactacaggcacacaccaccatgcccagctaacttttatatttttaatagaggtggggtttcaccatattggtcaggctggtctcaaactcctgacctcaggtgatccacccgcctcggcctcccaacatgctgggattacaggcatgagccactgtgcccaaccccttctagctttcttgatcactgattctagggttctctgctgaaatatatttgagacatcctggataaaagatcatgcaagagctcccaatatggtattaataattgattctggaggcttagctactcctgatggattagacatgactcaactgcctctcttatgtgtacaacacaacaacacaaccaagaaaggttattctggcattccatttattcagtttatttacagcccttacttccagcagcacgttaaagatatggccagggccgggtgcagtggctcaagtctgtaatcccaggactttgggaggccaaggtgggcggatcacaaggtcaggagtttgagaatctggcaattcttcagacttagaagcaaccagctcgataacacagtcttgtgtgggctctccctctgtccctccctcgcttccctcatttctcatccctgcccctgagactgtgcaccttcacatagccctgccatgagaccttcatctcaggctttgctttctggggtaactgaggctaaacactgagtggccctaaaagaggattgggatttggaagttagattattcaccagagaacagactttgctgatgatcaggcccaggttgtaattgttgaaaaaaagagaggatgcatagtcttatctcatctcctagtcaaagtcaacaccatgataaataagagtcaaatcctgagatgtgaattggggacatttgagtggttaaccctgagaagcttgcaccttcagacccctcaatacccctgctccccagagaaggctggacattgacctcagcacaggcaggagccctgcaagatgccatttgtcctactaaagatggacccctccactctgtttctaggtaaataaccaaagtcaagtctccacacagcctgagcaagaaagtcagagcctgctacaggagaaaataccacactggccaaaggattcactagccctggccactgtgtgtgggaggaaccagggaatcatgtgtgggagtcaatgttgaagctgttggactgggggtggggtggaatataagcctggccctggggagtttttcccgtttgagggcctttacccacaactcaagatccagtgctatagcaggagatcccagagctagtcctaacagatggtcaggattgaacttggcctagagtaaaatgaggaggatagtgccagaactttctcaacatactattgaggaagaggtcagaaggcttaaggaggtagtgtaactggaaaggggtcctgatccagaccccaggagagggttcttggaccttgcataagaaagagttcgagacgagtccacccagtaaagtgaaagcaattttattaaagaagaaacagaaaaatggctactccatagagcagcgacatgggctgcttaactgagtgttcttatgattatttcttgattctatgctaaacaaagggtggattatttgtgaggtttccaggaaaggggcagggatttcccagaactgatggatccccccacttttagaccatatagagtaacttcctgacgttgccatggcgtttgtaaactgtcatggccctggagggaatgtcttttagcatgttaatgtattataatgtgtataatgagcagtgaggacggccagaggtcgctttcatcaccatcttggttttggtgggttttggccggcttctttatcacatcctgttttatgagcagggtctttatgacctataacttctcctgccgacctcctatctcctcctgtgactaagaatgcagcctagcaggtctcagcctcattttaccatggagtcgctctgattccaatgcctctgacagcaggaatgttggaattgaattactatgcaagacctgagaagccattggaggacacagccttcattaggacactggcatctgtgacaggctgggtggtggtaattgtctgttggccagtgtggactgtgggagatgctactactgtaagatatgacaaggtttctcttcaaacaggctgatccgcttcttattctctaattccaagtaccaccccccgcctttcttctccttttccttctttctgattttactacatgcccaggcatgctacggccccagctcacattcctttccttatttaaaaatggactggggctgggcgcggtggctcatgcctgtaatcccagcactttgggaggccgaggcgggcggatcatgaggtcaggagatcgagaccatcctggctaacacggtgaaaccccgtctctactaaaaatgcaaaaacattagccaggcgtggttgcaggtgcctgcagtcccagcggctcaggaggctgaggcaggagaatggcgtgaacctgggaggtggaggttgcaatgagccgagattgtgccactgcactccagcctgggtgacagagcgagactccgtctcaaaaaaaaaaaaaaaaaaaaaaatagctgggcatggtggcgcgtgcctgtaataccagctactctggaggctgaggcaagagaatcgcttgaacccagtaggcggaagttgcagtgagccgagatcttgacactgcactccagcctggtgacagagtgagactctgtctcaaaaaaaaaaaaaagaaaaaaaaagacagaaagaaagagcacagacagagtcacaggtatttgcagtaggaagctgtcaggttagagtgcacggaaatagaaagtatattttacacttacagcacatcttcgtttgattagccacatttaaaatactgaatagcaacgtgtggctatttagtattcactaaaatcttggacagtgcaagtctaaagaatccttgatccgtccggcatggtggctcacgcctttaatcccagcactttgggaggccaaggtggaaggatcacttaaggtcaggagttcgagaccagcctggccaacatggtgaaacctcgtctctactaataatacaaaaaaaattagccgggcatggtggtgcatgcctgtaatcccaggtacttgggaggctgaggcaggagaatagcttgaatccaggaggcgctgcagtgagccgagatcatgccatgccactactgcactccagcctgggcaacagagtgagactgtctcaaaaaaaaaaaaaaaattgttgggcgtggtggctcacgcctgtaatcccagcactttgggaggctgaggggggtggatcacctgggttctggagttcgagaccagcctggccaacatggtgaaaccccatctctactaaaaatacaaaaattagctgggcgtggtggtgggcacctgaaatctcagctactcaggaggctgaggcaggagaatttcttgaacccaggaggcagaggttgcagtgagccaagatcgcgcctctgcactccatcctgggtggcagagcaagactatgtctcaaaaaaaaaaaaaaaaatacttgattgtctggacattctgcagaacatcatatggagacactatgttgacgacatcatgctgattgtaagcaagaaatggcaagtgttccagaaacacagtcaagacacatacatgccagaaggtgagatataaactctactaagattcagtggcctgccacactggtgacatttttaaacctgctagatgtttgtgtagaaaaggatttaaccttgcccaaagaggggtctggcctttgtccccagctactggacataatctctttaaactcttgaaatatcattcctgatagaagtatttttgttttgactaggggccttgggccagccagatagcaacaatgtgatctgggttgggggctttggatcaggtggcatcagtgtgacctcctgagtggctagagactagaatcaaccacatgggcagacaacccagcttacatgatggaattccaataaagactttggacacaagggcttgggtaagctttcctggttggcaatgctctatactgggaaacccattctgactccatagggagaggacaactggatattctcatttggtacctccctgggctttgccctatgcatttttcccttgtctgattattattattattatgagatggaatctcgctctgtcacccaggctggagtgcagtggaatgatctcaactcactgcaacctctgcctccccggttcaagcgattttcctgtctcggcctcccgagtagctgggactacagatgcataccaccacacccggctaatttttttgtatttttagtagagacggggtttcacgttagccaggatggtctcgatctcctgacctcatgttccgcctgcctcggcctctcaaagtgctaggaatacatgtgtgagccaccgcgcccagcccccttggctgattattaaagtgtatccttgagctgtagtaaattataaccgtgaatataacagcttttagtgagttttgtgagcacttctagcaaattatcaaacctaaggatagccttggggacccctgaacttgcagttggtgtcagaaataagggtgctcatgtgtgtaccatgccctctaattttgtagttaattaactttcacaactttattattaccgcttacactcaatgtttattcacatttatccacataccacttattctagtgccttgcatcaaagactttctatctcatgtactttattctgcttgaagtaaatcctttaggatattcttttttttttttaaactttgcacatacatacttttattttttatttatttttaattttgttatttttgtgggtacgtagtagatatatgtatttatggagtacatgagatgttttgatacaggcatgcaatgtgaaataagcacatcatggagaatggggtatccatcctctcaagcaatttatccttcaagttacaaacaatccaattacactctttaagttattttaaaatgtacatttaattttgtattgactagagtcactctgttgtgctatcaaatataattttttttttttttgagacagagtctcactcagtggcccagactgaaagtgcagtggcacaagctcggctcacttcaatctctgcctccctggttcaagcgaatctcctgcctcagcctcccacatagctgggattacaggcacacaccaccatgcccagctaatttttatatttttttagtagagacgggttttcgccatgttggccaggctggtcttgaactcctggcctcaaatgatctgaccacctcagcctcccaaagtgctaggattacaggcatgagccaccacacctggccaaaatagaatattctttagtgaggtctgctggtgacaatttttttcttttttttgagactgagtctcgctgttgtcagcttgggctggagtgcaatagcacgatctcagctcactgcaacctccacctcccggattccagcaattctcctgcctcagcctcccaagtagctgagagattacaggcacccaccaccacacgcggctaatttttgtatttttagtagaaatgggggttcaccgtgttggccaggctggtctcgaactcctgacctcaggtgatccacccaccttggcctcccaaagtgctgggattacaagcatgagccaccacgcacagccaattttttccgtttttgtctgaaatcttattttgtgtcatctttgaaatatatttttgatggatataaaattgttggttgatagttattatcattattattattattttgagacagggtctcactctgttgcctatgctggggtgtagtaatgtgatctcggttcactgcagacttgacctcctagggctcaggtgatcttcccacctcagcctccctagtagctgggactacagatgcatgccaccatacccaactaatttttctattttttgtagagatgaggctttgccacatttcccaggctggtctctaactcctgagctctagcaatccacccaccttggccttacaaagtgctgggccatgactagccagcagttactttttatagcatattgaatatttaatatgaatcttctggcatccactgtaactgtttaaaaaatcagctgtttacttggcactcttttttttttttttttttttgagacagagtcttgccctgtcgcccaggctggagtgcagtggcgtgatcttggctcactgcaagctctgcctcccgggttcacgccattctcctgcctcagcctccggagtagctgggactaaaggcgcccgccaccacgcccggctgatttttttgtatttttcgtagagttggggtttcaccgtgttagccaggatggtctcgatctcctgacctcgtgatctgtccgcctcggcctcccaaagtgctgggattataggcgtgagccaccgcgcccagcctcttttttttttttttttagacggagtcttactctgtcatctaggctggtgtacagtggcgtgatctcagctcagtgcaacctccacctcctgcctcagcctgccaaatagctgggattacaggtgcgtaccatcacgcccggctaatttttgtattttcagtagagatggggtttcaccatgttagacaggctggtctcgaactcctggcctcaagtgatctgcctgccccagcctcccaaagattacaggcatgagccaccgcacccggccaagtagcactcctttgaaggtaatctgcttcccctacccctagcaatttttaacaatttttcttcatttttatttcctgaagttttgttattaataatctgtgtgcagatttctttgtatttcttttgtttgcagttcatagtgattcttgaattagtgtgttggtttctgttatcaccacaggaaaattgtcagccgttagcttttcaaatatttccttgctaaattctctcttctcccctttcggtacaattgatttgattaaaactaaaaccagggccgggtgcagtgactcatgcctgtaatcccaacactttgagaggctgaggcaggtggatcacctaagctcaggagttcaagaccagcctggccaatatggtgaaaccccgtctctactaaaaatacaaaaattaccaggcatggtggcacacatttgtagtcaggaggctgaggcaggagaattgcttgaatccaggaggtggaggttgcagtgagctgagatcccaccactgcagtctggcctgggcgacagagtgagatgagaatctgtctcgaaaaaaaaagttatgaatgtttgataaactatatttgttagaatgtttgttgtagaatactattcattgatttttaaacaatgttagattaaaccattcactggatttgtgataattaacttactgattttacctcactgatttgttgtaattaatacaactggtataaaaagactgtgacgaggccgggcatggtggctcccgcctataatcccagcactttgggaggctgaggcaggcggatcacctgaggtcaggagttcaagaccagcctgaccaacatggtgaaaccccatctttactaaaaatacaaaattagccggtcgtggtggtgcatgcctgtaatcccagctcttcgggaggctgtggcaggagaatcacttgaacccgggaggtggaggttgcagtgagccgatatcgcgccattgcactccagcctgggcaacaagagcgaaactccgtctaaaaaaaaaaaagaaaaaaaacacataaaacaaaacaacactgtgacggttcccaaaaattaggagcataattaaaggaactcctgataaaaattaattttatcttacatgtaaactaaaatgactttatgaagttaattcagaaatacaatgcagggtattagtttgccacagctgcgtattcagcctaatgtaatattcttgttatttttaaattcttcttttaactttactcatatgtggatcatcaaatttcaaaagattaaatgacaatactcttagcagcaagcttccctaagcatataaacattttaatgggtgatgattcagaaggtacccgaagaatatgtactgccagatatcattcacccccatatacctgcccgacagacatcccattttgggaccctggataaatgtgtgggtggagagaaagataggagaaagtggtataagcaaatggctttggagtctgattgacagcgattgaaatcctgtctctacctcttaacagcctcatgatcctacataagttaccccgatcctcagggccacatctgtaaattgggggttgcgatggcagccatctcacagggtctcttttcggggaagggcaggaattatggattaagtgagctagtaattgtaaagcacttaatacaaggagggcgcataataagtacttcataaataatgacggccattatcatgactgaggtgtatgcagctgtcggggattacggcgacttcagaatttctggtgggcagggctcaaaggcagcaaatcacactggaagtcgaggtgaggcactgcttctgcacagactgcttagctggagagaatgaggaaggcttagaggagatttagaggaacttagagtcctccgcctccaactctgtgggatctgctcccgtgccagagacattcaggggatttctcgcactctcccctcccctacgtccctcccgccccatccaactaaccacacaacacatacaaaatagcccctgcgaggttctgcacgctggaagggaacaggagaagggcgctgcgctttcttgctgatgccctgtacttgggcccctggtagacacagccacttgtcccctcagcctgcagagaaatcccacgtagaccgcgcccgggtccttggcttcagccaatctccctttggtgggggtgggatgcacgatccaaggttttattggctacagacagcggggtgtggtccgccaagaacacagattggctcccgagggcatctcggatccctggtggggcgccgctcagcctcccggtgcaggcccggccgaggccaggaggaagcggccagaccgcgtccattcggcgccagctcactccggacgtccggagcctctgccagcgctgcttccgtccagtgcgcctggacgcgctgtccttaactggagaaaggcttcaccttgaaatccaggcttcatccctagttagcgtgtgaccttgagcagttgactttatttttcagtgcctagttttccagataccaggactgactccaaggactattactcatctggagggtttagcacagtaccgtcgcatagtaaatttccatgtcagttttggttacctttcatgcacttgcaaacatgccatgctctgaaacgaaataggcacatcttttttttttttttttttaaggagtcttcctctcgcccaggctggagtgcagtggcgcgatcttggctcactgcaacctccacctcccgtgttcgagattctcctgcctcagcctcctgattagctgggactacaggcatgccacgacgcccagttaatttttgtatttttagtagagacggggtttcgccatcttggccaggctggtctaactcctgacctcaggtgatctgactgcctcagcctctcaaagtgttgggattacaggcataagccactgcatctggccagaaatgaaataagtaaatcttttaacctgctctaacaatatagtgaaaagaccatattattattagagcaggttaagggatttgcctatttcgggttctagttatagtcttaaacttggacattcttgtagaaagtaaaaagtttcctcttcaaagttccccttcttgttaaagaatacatcataagtgttagaagtaatagtttattttaaagactaactttcttcaagcctccttgctttgtgctaataactctttgttaagccctatcctatgtaactgttggacatgctcacaggcacgttccagttcacagcctatgccccttccttatttggaaatgttattgcttccttaaacctttcggtaagcaacttcctctccttcttcgttcttccttgcacttacctatttagaaagttttaggctattagcaaatcggctatcagtttaagagtgtgaggtcccgctccagccaatggatgcaggacatagcagtgaggacgacccaaatgcgtaagggataaatatgtttgcttttcctttgttcaggtgtgctctcgacatcgttccatctgcgattgagcaccctttctgcagaaagtaaagattgccttgctggagatcttttgtctccgtgctgacttttcttcgtggcaccgattatctatttctaacaattttggtatttctaacattctgaacaatcttgggctagttgtctcttctgggcctgtttccccatccgtcacatgataaacttcattggtttaaaaaccccagcgaacatttattgagttactattaccttcctgccctccccaaccccaaccccagggagcagttacaacctcagccgctgagcgcactcgccgggtgttaagaagcaccaaagacagggaggcttgattgattttgctttgggagtagagggtcagaagattcacaggaaaatggcatttgagcaaggatgattcactggagctagcttttaaatactggcgaggcttttatgttgcagtcccttacaaagttgagcattcgcagggactgcactccgaaataagcccgcttccccttttcattcgctaatgatccagggagctgctggttccgcatgcggcaggttgtgccttttcctaatcagggttctgcatcgcctcgaacccgcaggccgtggcgggttctcctgaggaagcagggactggggtgcagggtgaagctgctcgtgccggccagcgcctgtgagcaaaactcaaacggaggagcaggaggggtcgagctggagcgtggcagggttgaccctgccttttagaagggcacaatttgaagggtacccaggggccggaagccggggacctaaggcccgccccgttccagctgctgggagggctcccgccccagggagttagttttgcagagactgggtctgcagcgctccaccgggggccggcgacagacgccacaaaacagctgcaggaacggtggctcgctccaggcacccagggcccgggaaagaggcgcgggtagcacgcgcgggtcacgtgggcgatgcgggcgtgcgcccctgcacccgcgggagggggatggggaaaaggggcggggccggcgcttgacctcccgtgaagcctagcgcggggaaggaccggaactccgggcgggcgggttgttgataatatggcggctggagctgcctgggcatcccgaggaggcggtggggcccactcccggaagaagggtcccttttcgcgctagtgcagcggcccctctggacccggaagtccgggccggttgctgaatgaggggagccgggccctccccgcgccagtccccccgcaccctccgtcccgacccgggccccgccatgtccttcttccggcggaaaggtagctgagggggcgccggcggggagtcaggccgggcctcaggggcggcggtggggcaggtgggcctgcgagggctttccccaaggcggcagcaaggccttcagcgagcctcgacctcggcgcagatgccccctgagtgccttgctctgctccgggactcttctgggagggagaaggtggccttcttgcgcgaggtcagaggagtattgtcgcgctggttcagaagcgattgctaaagcccatagaagttcctgcctgtttggttaagaacagttcttaggtgggggttagtttttttgtgtttctttgaggaccgtggatcaagatcaaggaaatctctttagaaccttattatggaagtctgaagtttccaaatgttgagggttttatgtctaaaagcaacacgtgaaaaaattgttttcttcacccagtgctgtcttccaatttcctctttggggggaggggtagttactgctgttactaaaataaaattacttattgctaaagttccccaacaggaagaccactacttttgatgactttggcaagtttgctaactactggaaccctaacttacaaacgaactacttacatttttgatttccagttgtattacctgcccaatgtttacgtagaaacagcttaattttgattctgggtaacgttgttgcacttcattaaaaatacatatccgaagtgagcaagtatgggtctgtggacagcagtgatttttcctgtcaattcctgttgcttcagataaaatgtaccagacagaggccgggcgcggtggctcacgcctgtaatcccagcactttgggaggcttggcgggtggatcacctgagatcgggagttcaagaccagcctgaccaacatggagaaaccccgtgtctactaaaaatacaaaattagccagggtggtggcgcatgcctgtaatgccagctacttgggaggctgaagcaggagaatcgcttgaacctgggaggcggaggttgcggtgagccgagatagcaccattgcactccagcctgggcaaaaagagcgaaactccgtctcaaaaaaaaagtaccagacagaaatgggttttgttttctttttttgttttgagacggagtttcgctcttgttgcccaggctcgagtgcaatggcgcgatctcagtctcggctcactgcaacctctgtctcccaggtttaatcgattctcctgcctcagcctcccaagtagctgggattacccatgccccaccatgcccggctaatttttgtatttttagtagaaacggggcttcaccatgttaggctggtcttgaacccctgacctcaagtgggcctcccacctcggcctcccaaagtgccaggattacaggcatgagccaccgcggccagccagaaatgggttttggaaaaagcactaaacaaaatcgaacttggtttcatatgacagctctgctgctaactgtaacaggggcagaccagttaacctacttttctgtcttctgtcagctgagaattagatgattcccaaaggcccattgaactctgaatgactttaaatacttcttcttaagtgggtacacggttttggtaactgatgccaggtgatgaatgcatgaaagtgcttaatgaatgaaaccggtaaaatagtaggaggaagctttattggtaaggcaggggtatacctaatagctctctaatttattggtattgaagtggttaacttttgtttttttaaggggggaaaacattctaagaataatgaggcaaactgcatattgcacaagagactgttgtctctattcaacaaataccttttgagtgtccagagtctgccaggtgctgtgctaggccctcacgattgagtagtgaaccagagaatgtccctgcacccatggagcttattgtctactggggtagacagataataaataagcaaacaaatcttctctcttctccctttcgctccatgtaagtgtgtgtgtataggtgtatacttacaagttgagtaaagtgttatgaaagattaagaggagaaatgcattttggttagatgttagaggactcagcaggtgaccttgaaacttagagctgaaggatcagtaggaggtaactagagaggccagggaatcgcatgttcaaaggccaggaggcaagaaagagcatggtgcccttcaagagaggaaagaaggctactgtgactggagcatagatgtaggcaagtgttgggtgattgagagctctacgggccatggttaggttttattcctaatgccgagatgccaaacatggtggttcatatctgtaatcccagtattttaggaggccgaggcaggaatatagcttgaacccaggagttcaagaccagcctgagcaacatgagacctgtacaaaacatttaaaaaattgctgggtatgatggtgcacacctgtggtcccagctactcaggaggctgaggcagaaggatcacttgagcctaggaggtggaggctacaatgagccatatttgagtcactacactccagcctggatgacaaagtgagaccatgtgtcaaacaaaatacagaaagaatattaatttaaaattttgaaagaggagtgatctgaacttatatcttaaaaagatcattctagggcatggtggctcatgcctgtaatcaagggctttgggaggctgagacaggaggatcacctgaggccagttcgagatcaacctgtacagcatagagagactccatctctacaaaaagaaaaaataaatagctgggtgttgtgagttattcaggaggctgaagcagaaagatcacttgagcccaggagtttgaggctgcagtaagctatgatcccaccactgcaacacagtgagatcttgtctcaaaaaaaaaaaaaaatcattctaggtgctttttggaggctggatgtggtaagagtagaagctggagatggtcctgttagggattcgattcagactttaaataccatcaatgcattgagtcccaaatttacatcactacgttggatccttgcccctgaatccagactggtatatccaactttaggttcagtttgtatctctacctgaccaatatagaggtgtccagtcttttggcttccctaggccacattggaagaagaattgtcttgagccacacatagagtacactaacgctaacaatagcagatgagctaaaaaaaaatcgcaaaacttataatgttttaagaaagtttacgaatttgtgttgggcacattcagagccatcctgggccgcgggatggacaagcttaatccagtagataccttcaacttacaatatctaaaattttatgccagatttagtcattttaaacctgctcatcagtttttctcaagaagtagtattttggctttttttcttttcttttttttgagatggagtttcgctcttatcgttcaagctggagtgcagtggcggatcttggctcactgcaacctccgcctcctgggttcaagtgattctcctgcctcagcctcgcaagtagctggaattacaggcatgcgccaccatgaccagctaatttttggagacagggtttcaccatgttggtcaggctggttttgtactcctgacctcaggtgatctgcctgcctcggcctcccaaaggctgggattacaggcatgagccaccgctcccggctgcatttttggatttttagttgctcagcccaaaactttagtacatctttgaacctcttctttcctcctactctatatctgatccatcagcaaatctgttaggtctacctcacacatatcgaaatcctaccacgtctcaccatctgtgacaattaacaccctggtctaggcagtcatctctgttaagattgagtggttaaggatgtcctctaaggagatgacattcaaatcttagcttaaatgtcaagagggagctggttttataaagattgaggaggcagcattattttgccataggcttccatttggtttccattccattcttgatacttatggtatatattcaaaacaaatgcacagaaacagacccaggtatattgggaatttcggatatagagttcctagttgggaaaagatagactgatctgtaaatgatgctagttatccatcatctggcaaaaaataatttcctgcctcctctcatatatctcagatcaacagactttttctgttaagggccaaatcataaatattttaggctttccagaccatatggtttctgtcacactctcctttatccttgaagccatagacaatatgtaaacaaatgggcatggctgtgctacgataaaactttacttacaaaaactggtagtgggccagtttaggcatggccagcactttgggaggctaaggcagatggatcacttggggtcaggagtttgagaccagcctggccaacatggtgaaaccctgtctctactaaaaatacaaaaaatagctgggcatggtggtgggtgtctataattccagctactctggaggctaagacacaagaatcacttgaacccaggaggcagaggttgcagtgagctgagatagcaccactgcactccagccagggtgacggagtcttaaagcaaaacaaaacaaaaggtagtgggttgtatttggcccatgggctgtagtttgccaatccctgatgcagaaacaaattccaggtaaataagagcctggaatgttaaaaaaacaaaacttgaagtcatgtagaagaacaggtagggggaacaatcctgatctcaggataggaagggatattgcttaaaataagacacaggaaaatataatccatgttgtgtaaatttgactacgttaaaacttaaaactttcgccaagcgcggtggctcacgcctgtaataccagtactttgggaggccgaggtgagcagatcaccaggtcaggagattgagaccatcctggctaacacggtgaaaccccgtctctactaaaaatacaaaacattagccgggcgtggtggcgggcgcctgtagtcccagctacttgggaggctgaggcaggagaatggcctgaacccgggaggcgaagcttgcagtgagctgagatcgcgccactgcactccagcctgggcgacagagtgagattccgtctcaaaaaaacaaaacaaaacaaagcaaaaaacctaaaactttcatacaataaagtatacctaagatacttctagaagagaagatttacatccaggacgtgtatggaatttctgcaagtaataagtaaaagacaagggacatgaagaggcagttcacaaaagaggaagccaaaatgaccaataaacatgaaaggatgtttaacctcaaaggaaacaaggaaatgaattaaaaacatcaaatgccatttcaaaactagtaagttggcaaaattaaaaataccaaggatgagaatatgaagcatggctatatgagtgcatggaatggtacagtcactttcattaaaaatgcacataatttgttttttatttatttttttgagacagtctatgtcgcccaggctagaatgcagtggcatgatctcggctcaccacaatctctgcctcctgggttcaagcaattctcctgcctcagcctcctgagtagctgggattacaggcacatgccacaacgcccggttaagttttgtatttttagtagagacagggttttgccatgttggccaggctggtctcgaactcctgacctcaggtgagctgcttcccaaagtgctgggattagaggcgtgagccaatgctcctggctgaaaaaaatgcacataatttgttacctagcaattccatgtctagaggcttatcctagagaaattcttgcttatatgcataggaagacgtgtactagaatgttcactagttgaatgtttaagtgaaaattaggaaataaagtaaatgttcattaacaggaaaatgagtaaaggtatatttataaaacaattaagtagctaaaatgaataaactagagctgcgtgaatgaactagaactggttcaatagtcatgtcagattattgaatgaatacaggtcagatatgtatagagtgtcatttgtgtaattaattttttttttttttttgagatggagtctcactctgttgcccaggctggagtgcagtggcgtgatctcagctcactgcaacctccacctcctgggttaaagtgattctcctgcctcagcctcccgagtagttgggattacaggcatgcaccaccatgcccagctcattttcctatttttagtggccacagggtttcaccatgttggccaggctggtcttgaactcctgacctcaagtgttccacccaacttggcctcccaaagtgctaggattacaggcgtgagccaccgtgctcagccatttgcgtgatttttaaagatgtgcagaataatgccattaaaaaaaatacacatacatgtatatatatacacgtttggctgggtgtggtggctcacacctgtaatcccagcactttgggaggctgaggcaggaggatcacttgagcccaggtgtacaagactagcctgggcgagatagcaagaccccatctcaacaacagaaaggataattaggtatggtggcatgagaggatcacttgagcccaggagttcgagtgttatcaggccactgcactctagcctggacaacaaagcaagaccgtgtctcaaaaaaataaaaataaaaagtatttgtatgtggtcatagtcaaaaaacgtacatggaaggaaaatgtctttatttatttatttatttttttttttttaagacagagtcttgctctgtcacccaggctggggtacagtggtgtaatctcagctcaccgcaatctcggcctcccgggttcaagcgattcttctgcctcagccttctaagtagctgggactacaggtacccgccaccacaccctgctaattcttgtgttttcagtagagacagggtttcaccatgttggcaaggctggtctcgaactcctgaccttaagtgagccacccgccttggcctcccaaagtcctgggattacaggtgtgagccactgcgcttggccaggaaatatctaatttagtaagtatttatatctgggaaaggaagggtcaggtggtgattcataggaactctaaagtctatgtataatacttagggggacagaaggaaataaagcaaaatgctgatatttgattgttgagttgtgtatatgttagaagtataacataggagatctgattgatagtaggagaatgtttttaggtggtaaaagtggaaccgtggtggtttgttttggcagtagaatcagttggtcatagtttgtatgtggaaggtaataaacagaccatgttaaggatgacttccggaattttggtctgagtagtgggtggatgacagtgtcattcatgagggaagatgaagactgaggtaggaacaggtttgggagaagatgacatgttcccttttagacaagtggaattatggaagatggcaggtaggtggttagctatatgaatttgagataaaagatttaggatggagatataaatttaggagtaacagcgtatctatggtattgtaagccttaagaatgggtaggatcagccaggaaatacagatgtatatgcagaagagaggagtcaaggaagccaagacaagttaatgtttaaagtgagtgatgtagtccatgggcagatgctgctgagagggctgcaaacaccagtgaccctacaacatttttaaatgtcgtcttcctgacagcagtgatcagtacctgcaacgatcttatttatttttttcatgttagtctccacacacttgaatgtagactttttgaaggcaaaatcattgccttttctgagctgggagcatgtctggcacataccaagcactcaacagttgatgtattgacttcatccagatactctgagggcgagttatttcctgctactagcctttcacctttcaatgtttaagagcacaaatacagagatgggcacgttttggcatttcttattttgataaccttttcctggtaagattttttaatgttgaaaaaaaaaaacaagaaaagagggttaaaaatagtcttatgtcagatcctgtgatagaattcacacttggcttaagctgctgggcaccttcctatcttggatgtcatattagcttatctacagcagaatttttactgttttatgtagtaaggaagcaattatatgattattttacagacaaattattctttatcttttatttttttagacggagtctctctttgtctcccaggctggagtacagtgtcgcgatctcggctcactgcaacctccgcctcctgggttcaagcaattctctgcctcagcctcccaagtagctgggcttacaggtgtccgccaccacacccagctcattgttttgtatttttagtagagatggggtttcaccatgttggccaggctggtcttgagctactgacctcaggtgatccacccgccttggcatcccaaagtgctggaattacaggcgtgagccaccgtgcctggcccagacaaattattatactctgagtgttagaggcttaggatgttttcacttgatgctatgggaggaataagtaataagatatgatacacaaccaaagacctttcttcactatgcttctagtagctagtactatggatgacacatggtaataatattggttagcatttgtcctcaatttactgtgctagttactcttctaagccccttacaggtatatattttttttcatcaataatcctctaaggtagtttttattattgacctaattttataaatcaagaaaattaagacccagagaagtaagtaacttgtccaagatcacatggcttataagtggtagagccagaatttgaccccagatgttgtgactacattgtctctccataagcaggttcaactcttttgactggatgctgttccaaggtcacttccttagagaagcctttgctgacaactaccctcctgtgccctcctccaaggctgtccattgttctagaactttgaatactcatcttagaataaagctggtctaatttttacagtgttatagaatggatctctgactgcaaaagttggtcataattatctttttatgttctagtgaaaggcaaagaacaagagaagacctcagatgtgaagtccattaaaggtaagttctgcccttggcagtccactgcattaaaaagtgatgtgctttgcatttgtgagttctttaatcctgttatactctctcttttggcattaatcatttctgccttattttataattacttatgattttgatttatttccctctttaacctgtataatgctttaacatctagcatataataagtaggctttttttttttttttttttttggagacggagtcttgctctgttacccaggctggagtgcagtggcgcgatcttggctcactgcaagctctgtctcccgggttcacaccattctcctgcctcagcctccccagcagctgggactacaggtgcacggcgccacgcctggctaattttttgtattttttagtagagacagagtttcaccatgttagccagtatggtctcgatctcctgaccttgtgatccgcccgcctcggcctcccaaagtgctgggattacaagcgtgagccaccgcacccggccgtaagtaggctttttttaccttaattttatttttttgagatggagtcttgctcttatccccaggctggagtgcagtggtgccatctcggctcactgcagcatccacctcccgggttcaagcgattctcctgcctcagcctcccgagtagctgggattacaggtggccgccaccatgcccagctaatttttgtatttttagtagagacagggtttcaccgtgttggccaggccagtctcaaactcctgacctcaagtgatccactcgccttggcctcccaaagtcctgggattacaggcgtgagccaccatgcctggccataagtaggcttttactgagccttgtgtgtattggctatcctagtgattacagtgaaccagtgcccttcttattaatcacacatttaattgttccctaaaagtgattagttcactttatttatttagtaagacaaaaaatgaagaatactcttaactgagcagtctgttaactgtaggaaagcactgacacttataaggcttagttttctgtcatttatccagaagtatggttgattacagtttttacttttttatttgaatgaacaaccttaatttaaaatatattttgtttattttttgttgggatcgatacattgtccttgtttatagattagagcatgctttttaaagatgctgtattactcactgattttatttgtccagtgtacagagattgaagtgggaaaattataatggaaattgtttccatagtcattacatattaatttcatcaatttatttccataaaatctgtagattgctacttatttagatttttccttcaaatgtttttatgttgtattgcttgcactgagtatttattctatatgctcaatttgctggagaagaagactaattataacttaggcaagttgtaaaattagggaaaaaagtaaggtaccttacagcctagtttacttatttcttatgtaaagccagttagattccacattagttcaaactgccttctttgagcaaaacttgattggcagtgataaaggcttaaagcccttctcaagcagagacctgtaaagactagatctgactgtagtagaaggaaggaacttagatgtttcaggcagtgagaacaccagtcttccactctaaactttgccactaacagtatgaccttgggaagttgtaactttcttcagattcttcatttgttgaatggggggattggcctagctaatttctaaatctctactgggctaaaaaattctgtgcttatactctgattatgaagtacataatctgtgcttaacattcactgacttatccttaggataatacagaagcagtacaagaaacagcccctcaagatgtttgcagtctggttagaaagacaaacttatacacagaacagtagcaaatagaccaaaataataatagctgccatttatagaacacttcttctgttctgggcattagacaaaaactgactataacggtgaacaaaaaagacttaggtcctgccctcattgaacttacagattagtaggggagaggaacattaatcaagtaattccacagatggcttagcctagattggtagtgatggaagtaaagagatgtgaacggacttgaaaaaaaattcggaggcaaaatggatagaagtttattattgattaaatatgaggtgtgagagagagggatatttaagattgatacctaccttctggcttgcctaacagaaccaaaacaggaaattatatgttcagttttgttatgttgggtgggaggtgcttttgagtcattcatttatatatgttatatatgttattttatatgcatagtaattttaaggtctgagttttaaaccaaaggttagagagtgattttttagagtctagcaaacctaagttgaaatcctgcctgttgaaatggctgtttactagctcattaacctagggcaaagtattcaacttgttttcatttttgtcttcatctctaaaatgaggaaaatatggtcttacaagattgtcctgagagatagatgaaataatatccaaaaaaaaaaaaggtacatagagaaactcgtatagtgcctggtatatagtaggtcctccattggtagctatcattatctagttttaacatagccttcagtttgttgaattagtcaaactgagtgaagcactgcaaggaattcagaggaatttgagatcaacaaatgatttctgaagtttagggaagacttcatggcaatgacacttaccttgtataaaagttgaagaataagaaagatttgaatgagagattctttctcttctccctaccagcccagcttcttatttgaggatatattgggcaaaggggccttcagacaagtagagggagatttttacagaaagattgagatgaaggtatagaaggctgtaaagaccagaaaagagaattgagacagaggaagcaggaagccactgtaggtttttgagcaagatattgatgctgtaagtatggtgtttatgaaaggttagtctggaagagatttgcaggatggagaccccggaagtttttttgttataatacagaaagacttgcactgagggtgaggtgttaaaaataaacaggtaagtaaatgtttaaacatcttgaaggaaaagtcaacaaatcttggcaagtaaacagataacagtgaaaaagaatgggaccaagattttgagttttggagactggtggattgaacagacagggaaattgagaggagaatcagatgatgatgttttaagttgatatttagacagattgtgcttgagatggtaaagtcaatgtgggtgggaatgcttagtagcgagtaatcagtgatacaagaccaaagcccaggtcaaagacaagtcacagatacagatcagggctttttcatctgctccacagaggtgtaccctaggagctgttgcaaacagtccatgtggagggtgtgagtaagatgtttcccttgaatttgccagaattacttttttgttgttgttgttgttttttctgagacagattctcgctctgttgcccaggctggagggcagtggcgagatcgcgcagctcactgcaacctctgcctctcgggttcgagtgattctcctgcctcagcctcccaagtagctgggattacaggcttgtgccaccaagcccagctaatttcttttgtatttttagtagagatggggtttcaccatgttggccagactggtctcgaactcctggcctcgtgatctgcctgcctcagcctccaaaagttctgggattacaggcgtgaaccactgcacccggtcccttgttaagtttattttggtgggaagcaaaggaggtttcagcttttaaaaagtttgaaaattattgctctggtaataattaaagatttgagagtaaatatgctttctagcagaaagaataaaagaagaacagatagcctcaagaaggggagccaaagaagcaggctatatctgacacactgggtgttgataaatgggtattaaaagaatgagagcaatgagcagatagaagaggaaattaggagagtataataccatggagaccaagaaagatagactatcaggaaggagtggtaaaaataagttactagttctaagagagatgttaagagggaccggggaaagccttgtacaaatgagttagtagcattttacattatatacatctaattaagaaacaatgcgagagtctcaccattcctatagactcttacttgtacttgtctgaacacgaaaactggcttttgtttataaataagctaaaaattattttgctccaatttctcatgaaaataaaaataaaccttcttttaacattgaaaaaatagtttgaagacagtcactcttcattttgtaattcccacaactattattgaatgactgaaattatctttattctgaagccaaaggggtgatactgatatttcttcagactactaaaaatatattttatgaatttttagtgtgctttatctttttttgtttttttttttgagatggagtttcactcccgttgctcaggctggagggcagtggtgcaatctcagctcactgcaaccttcgcctcccagattcaagcaattctcctgcctcggtctcccaagtagctgggattacaggcacctgcccccacacccagctaattttttgtatttttagtagagacagggtttcaccatgttggtcaggctggtcttgaactcctgacctcaggtgatccacccaccttggcctcccaaagtactgcgattgcaggcatgagccaccatgcctggcctgaggaatatttttctaggttccccccaccccaagcatttattctgcaattttagttttgttcctaaagcaagcaaggtttaaggatttaaaaataatccgtattttagaatgctttctggctttgttactttttatccacagtagaagttctcagagaatgatctccctcttttaatttaactttttggcacagtattttgagaattataaataatattagaatgttttctggctgggtgtggtggctcatgcctgtaatcctggctacttgggaggctgaggcaggagaatcacttgaacatgggaggcagaggttgcagtgagccgaggtcatgccactgcactccagcctgggtgacagagcaagactctgtctgggaaaaaaaaaaaaaaaaaaaagagtgttttctttcctattttccaccacttgattaagttacttttcctcttaagtattttttgctgagtatgctgacttaagagtaatgttacaaaatttaatttttaaagttctctgaaagcccctttatgagagttttaggctatcaaattgtgtttaattcttaacaattttttgaaaaattatagcttcaatatccgtacattccccacaaaaaagcactaaaaatcatgccttgctggaggctgcaggaccaagtcatgttgcaatcaatgccatttctgccaacatggactccttttcaagtagcaggacagccacacttaagaagcagccaagccacatggaggccgctcattttggtgacctgggtaagtaactatcattttttattaacttgtattagaaggatttgagtacaatatgtgaaacttctgtcataggatacagaactatataattggaaagtgctttggaaaaaatgtatttaaaataacagctacaagtataatgggtagctgtgttgtgttcctgtaaatatagaatataaagcatgcccagtagaaaaacaagcatttccagaagaaatatatctgatcactaaatataaatatatgaaaaagatgtctcactttattactgagggaagtgcaaattaaaataatcagttaatgttctcctaacacattagcatattttttaaagtttgacaatttgaatgtcagtgaagatgcagggaaatacccctcctatttagtgataatataatctggtgaagactctttggaaagcaatttggaaatcagtataaaatatgcatgtcatttaggccactctttctaagacctagccctcagatatgctcattcatatgtgcaggtgtgtatgtgtgtgtgtgtgtgtgtgtgtgtgtgtatatgtatgtatgtatgtatgtatgtatgtatgttgaaggctattcattatagtattgtttgtgatagcaaaaaattatggacaacatataaatatctgttatagggaaataaccaaattgtggtatacgcatgctctggagtataatatagccatttgtttctatttatttattttcttgagacagggttttactctgttgcccaggctggagtgcagtggtatgatcatggttcactgcagccttcacctcctgggcacaagccattctctcgcctcagcctccagagttactaggactgcaggcatgtgtcaccacacccagataattttttaattttttgtagagacagggtctcactatgttgcctaagctggtctcaaactcctggcctcaagcaattctcccacacaggcctcccaaagtgctgggattaccaacgtgaaccaccacacctggttcagtgtagccatttagaaatctaaaaaagacgtgggaaaatgtctaaggcatgtttaaatgtgagaaaagcaagtcacagtatgcatggtaaaatccgttatattaaaataagttcttccaaaacaaaaacatatgcaggagacctttattttgtcagtatttcttacccaaatttctgcacttagaaaattgcatgtcatgttgtcataagttgaaaaaaagatccatgaaccaatggacttctaataaaatcagtcctgcttttgacatctctctctacttttgtgtatattcaaaccagagtgtcaatgtgtttgtggggcacacttagcaataatacatagcagacaaaatgcatatagctcagagagtaaaattgtaagttttgctagatcactcataaattgctgatgagaatttaaaatggtgcagatgctctggaaaacaggcagtttctttctttctttttttttttctttttgagacagggtctcactctgttgcgcaggctggagtacagtggcgtgattacaactcactgcagcctcaccctcctcaggttcaggtgatcctccctcagtctcctgagtagctgggactataggcatgcaccaccacgcctggctaatttttgtattttttttttttttttttgtagagacggggtttcgccatgtttcccaggctggtctcaaactcctggaatcaagcgatccacttgcgtaggcctcccaaagtgctgggattacgggcgtgagctactgtgcctggcctaggcagtttgtttgtttgtttgtttgtttgtttatttatttgtagacggagtctcacaggctggagtgcagtggcccaatttttggctcactgcaacctccgcctcccaggttcaagctattctcctgcctcagcctcctgagtagctgggatgacaggtgcctgccataatgcctggctgatttttgtatatttagtagatatggggtttcaccatgttggtcaggctggttttgaactcctgacctcaggtgatcagcccgcctcggcctcccaaagtgctgggattacaggcatgagccgtcatccctggctggtggtttcttatgacgtgaaacatgcaattaccatatgacctagcagttgcactctgtatttatcccagataaatgaaaacttaccttccaataaaaacctgtgcacaaatgttcatagcagcttaatattgaaaaactggatgttcttcagcaggtgaatgaactggttcattcataccatggaataccattcagcaataaaaaggaacaaactgttgatacatttaaccacctggatgaatatcaagggaattatgctgtcagacaaaaaccagtccctaaagactacatatagtatgattccgtttggataatattcttgaaatagagaaattaagagaaatgaaaagattagtgtttgccagatgttagagacagggaggtgagaggggtaagtgggtgtagttataaaagtgcaacatgagggatctttgtgatgttgaagttgtatcttggcagtggatgcagaaatctcaatgtgataaaattacaaagaactaaaaacaagaatgagtatagataaaactggggaaatctgaacaagttagagtgttgtatcactgtcagtatcttagagtgatattgtactatagctttgcaagatgttaccatgggagaaactaaagtgtacaagggatctctaggtattattatttttttagagatggggtttcactatgttccccaggccggtcttgaactcctgggctctagtgatccgcctgccccagcctcctaaagtactggaattacaggcgtgagcgaccatgcctggccctttcagtattgtatcttagaacttcatgtgaatctagcattatctcatagaatttaattaaaagaaattgtaaacctcacagaagatcagaatttcctcaagtttgtgatgttgacaaagatgaactagttgacactgacagtaagactgaggatgaagacacgacgtgcttcaaaaaaatgatttgaatatcaatggattaagaagaactcttttgacaaattgatgaaaccctcagtcagttttataagaatgcccatctttatgatcatgctatgaaagccaatttttaaaaaaattttttgtctttcctaacaattagcttgtggttataatttaaatttagttaaatataagataaatgattttttattaagtttagtttcatttttcaaggtacgatctcaaagctactctttaacctactatgaatgaataatgctgagttcataacatctttgtagatatatccacaattttccctcaggataagtgcctacaagtggaattactggactgaaaataatgcagtttgctaagactttgctatctgttcctgaatgctcctccaaaaaggttttgccagtttacatcctcatgaccagcgaatgagagtgttgcctattttcctgtgcccttgttactgcttaataatttttgaaaaaaatctaatttgacagacaaaaatgcattttatgttaatttgcttttctgggatttttaatgaggttgagtatagtttttaatatttttattggcccctttggaactagtatcataagttttttttcttaagaatttatgtagtctgggctgggcgcagtggctcacgcctgcaatcccagcactttgggaggccgaggtgggtggattgccgaaggtcaggagtttgagaccatcctgaccaacatggtgaaaccgaatctctactaaaagtacaaaaactagctcagcgtggtggcgggtgcctgtaatcccagctacttaggaggctgagtcaagagaatcgcttgaacccgggaggtggaggttggttgcattgagccgagatcgcgccattgctctccagcctaggcaacaagagtgaaaagtctcaaaaaaaaaaaaaaaaaaaaaaaaaagaatttacatggtctgaattgccattaaaagagatatgagaattattgagtaacaaataactttttaataatttaggcaagttttggacgattgtactttgtttagaaaccaaaagcatagtatttgtagtttttttatttactttagttgctaggaagtaaactttattcaaggtctctggtaccagttgttgctaaaagtgattgactaatctgtcaatctgaaattatttgttgctgaactgctaattcttttgcttctatcttttaggcagatcttgtctggactaccagactcaagagaccaaatcaagcctttctaagacccttgaacaagtcttgcacgacactattgtcctcccttacttcattcaattcatggaacttcggcgaatggagcatttggtgaaattttggttagaggctgaaagttttcattcaacaacttggtcgcgaataagagcacacagtctaaacacagtgaagcagagctcactggctgagcctgtctctccatctaaaaagcatgaaactacagcgtcttttttaactgattctcttgataagagattggaggattctggctcagcacagttgtttatgactcattcagaaggaattgacctgaataatagaactaacagcactcagaatcacttgctgctttcccaggaatgtgacagtgcccattctctccgtcttgaaatggccagagcaggaactcaccaagtttccatggaaacccaagaatcttcctctacacttacagtagccagtagaaatagtcccgcttctccactaaaagaattgtcaggaaaactaatgaaaagtgagtatgtgattttcttgtgtgtacatatgtgtctcactttctttttttaatttactaagcagaacttcagatgaggaataaaatgattggaatattttttttctcctctaactacttgtaaatttgggagaatttggagagtgtagtagagtcagatcagtgtatggaaaaggagcaggagtgactggaccttctaagaagtgtgttatcagaattagtaaatgaagggtcaaatgtcctacttttcccctccactgattttgacatcaaaccattatccacatagccttatttcctccctcggtcttaattttattaatattttactgcactttgcagataaaatttttaaaaaatttttaaaaattgccaataagtgacatttattaagttcagtgcttagtgtatatttggattttatttattagtcacaagacctttgtgcaggtagtaggcatgattatctttttttttttgagatggagtcttgctctgtcgcccaggctggagtgcaatggcgcggtctcggctcactgcaacctccgggttcatgccattctcctgcctcagcctcccaaatagctgggactacaggcgcctgccaccacacccggctaatttttttgtatttttagtagagacggggtttcaccatgttcgccaggatggtctcgatctcctgactttgtgatccgcctgcctcggcctcccaaagtgctgggattacaggcatgagccaccgcgcccggactgattatcttatttacacatgagaaaaccagggcttagaaaggttaggtaacttcctctaggttgtacagtaaatgtggacctagaagcattttgacaagagcacctgtttttttttcttctctattagtttagaaattatatactcttaattatcacctgggattttgattagacagccttcatgttctttttcatcttaaatgttctttgtgtcttaaagggctaagtgatttcttcagatcttttagttcactcattctcagtgaactaaaatgaggtctaatctgctactgaatcaagttttcagcatgttatttccttcctccctccctccctccttccttccctcaaccaggctcccgaggagctgggattacaggcgcccgccaccactcctggctaatttttatattttagtagagacggggtttcaccatgttggtcaggctgatcttgaactcctgacctcaagtgacccacctgcctcggcctcccaaagtgctgggattacaggcatgaatcaccacacctgacggcatgttattttcatcgcaaagttactgtaagctgggagaagtggcacacacttgtactcccagctactcaggaagcttaaggtgagaagattgcttgagcccaggagttttgagaccaacctgggcaacacagcaagaccccagctcaaacaaagaaaaaaagttattgaattttttatttctatggatcattttttgtagtttcttattcctttcacccttcattcccacttttgatcccatcttttatttatttagttttattaaatgtatatttgtctgataattctgctatctacagttttttgtggacctgactcagcatttctttgtttcttcggattcagactgttggtggcttgtgattttagtgatttttggccgtgaacatgtttcttggacttttgtctgtgggaattctctgtgtactctgtataaattaagttacttcaggtgttttgcattttcttttgccatgcacctggggcctgggtcactacccttctggtaccacttaaaactgaatttttgtcttgggtgctcgtactgatcctgtatgagtacaggtttatacttactgtagaaatatggtgtttgattatggggtattgtcccagatggtgctggagtattaatatgctctctgttaaacttaatgtgttgtccctgtaaaactccaaaattctgaattccagaatactactggccccaaatgtttaagataagggcactgcctgtatttgtttctgcctcccactattttccttagtttaacacaaactcacctttttaaaaaacattttgagagaattcagtattgggaagagtttctaacctgtttctggaaatggaagtccaaagtctgtttctgtaattgttttttttttgagatggagtctcactctgtcacccaggctggagtgcaatgacgtactctcagctcactgcaacctccacctcccgggttcaagcgattctcttgcctcagccccctgagtagctgggattacaggtgcccaccaccatgcctggctgatttttgtatttttagaagagatggggtttcgccatgttggccaggctggtcttgaactcctgactttgtgatctgcccacctcagcctcccaaagtgctaggattatgtttctgtaattgtaatacatttattgtttttagaaactgtctttgctttagtggtaattttcaataaaaatagaaatagcagtggagttattaaaagagcattagttacatttttccctttttcattatcttcaaatattatatatagtaagtttgacctttttaaaatgtatacttgtatcagttttaacacatacatagattcctgtaactgtcaccactataagggtaaagaacagttagttccttcacctttgaagtcaagccccacctctatcccaacacttggcaaccgctgatctttctccgtctcaatagctttgccttttctctttttttttcttatttttttttttgagacagcgtcttgctctgtcgcccgagctggagtgcagtgaggcaatctcggctcactgcaacctccgcctcctgggttcaagcagttctcctgccttagcctccctagtagctgggattataggcacgcaccaccacacccggctgatttttttgtatttttagtagaaatggggtttcaccatgttggccaggctggtctcaaactcttgacctcaagtgatccacctgcctcggcctcccaaagtgctgggattacaggcgtgagccactgtgcccaatcaggactttttttttttaaatttacattcaacttgtcatttttttcttgtatggattgtgccttcagagtcacacctaagagccctttgcctaagcaaaggtcatgaagattttctcatatgtttccttttaaaagtattgtggttggccaggtgccatggcttatgcctgtaatctcagcactttgagaagctgaggtgggcagattacgaggtcaggagatcgagaccatcctggctaatgcggtgaaaccccatctctactaaaaatacaaaaaaaaaaaaaaattagccgggcgtggtggcgggcacctgtagtcccagctacttgagaggttgaggcaggagaatagtgtgaacccgggaggtggagcttgcagtgagccgagatcgcgccactgcactccagcctgggcaacacagtgagactccatctcaaaaaaaaaaaaaaagtattatggttttacactttacgtttagatatatatcttttttgagttaatgtcgtataagtatgagggttacgtcagattttttgttttttgtttatttttacatatggatgtctagttgttctaataccatttgttgaaaagacaacctttactccattgaattgcctttgtacttttgccatatttgtctaggcctgtttttggactcctttttctgtttcatgatgtgtgtgtctattcctttgttaataccacatggtcttaattactgtatagtaagtcttaaaattgggtaatgctggccttataaaacgaattgggaagtttttatttttactcttatttccattttctagaagagattgtgtagaattggtgtcatttcttctttagatatttggttgaattgggaagtgatgccatctgggcctagggttttgttttttgtgtgtgagacagagtctcacttctgtcacccaggttggagtgcagtggtgagatcttggcttactgcaacctctgcctcccaggttcaagttatcctcctgcctcagcctcccaaatagctgggattacaagcgtgtgccaccatgcccgactaatttttgtatttttaatgcagacagggtttcaccatgttagccaagctggtctcgaacttgtgacctcaagtgattagcccaccttggcctcccaaagtgttaggattatagatgtgagccaccgtgcctggcaggggcctagggttttctttttcagagtattttaaactatgaattcagattatttaatagatataggactatttaagttatctgtttcttcttgagtgaatttttactgtagtttatggcctttgagtaattaattgtattgaattgtcaaatttatgagcgtgtaattatttatagcatttcgggtttgtagtggtatccctcttttattcctggtgttggcaattgtgtcttgtttttctttgtcagattgtatagggatttattagtcttttcaaagaactagcttttgttttgatttttctgttgttttgttttcaattttattgattttctgctctttattatttcttttctattatttctgcttgctttgggtttattttactcttttttttttctccaagttgcttaaagtagaaacttagatttctggtttgagacctttcttttctaagataagcatttaatactgtaaatttccttctaaccactgctttagttacacccccacaaattctggtattttgaactgagcacaaatgaaatgttctaatttcccttgaatcttattcttttaccaatgaattatttagaaatatgttatttagtttgcaagcaattggagacttttttcctgttatttttctaccatttatttctcatttcattatattatggtcagagaatatattttgaatgatttcatttattaatttttaaaaataacattaaaaaattttttaaaatgtgaatataccacatacagtataaagattgtacattctgtttttggacagttttctataaatgtcaagttgatttagttggttaatgatggtgttcagtttttctttattcttgctgatactttgtatgcagttatatcactttattactcagaagagtgttgaactttccaactacaatttttttttccaattttactttcagctctatctggttttgcttcatgtattttgaggctctgttgttaggtgtgtacacattcaggatgatatcttctgggtgaattgcctgttttatcattatgtaattccctctttatggtaattttccttgttctaagatcagaaatatctgttgtccaatttatatagacactgcagctttcatttgattagtgcttgcatggcatatctttttccatttttttacttttgatctacctttataattctatttaaagggggcttcttgtaggcagcatatagttgggtagtgttatttatttatttatttatttatttatttatttatttattgagacagagttttgctcttgttgcccaagctggagtgcagtggtgcaatcctggcttaccacaacctccacctcctgggttgcagtgattctcctgcctcagcctcccaagtagctgggattacaggcacgcgcaccatgcctggctgattttttgtatttttagtagaaacggattttcaccatgttagccaggctcgtcttgaactcctgacctcaggtgatccacctgctttggcctcccaaagtgctgggattacaggcgtgagccactgcacccggctgagtcatgttatttttaatcttttctcacaatacagggtttttgttggtaaatttaattattttaatataaattttagtataattatttacattaaatgtaactgttgcactggggtatttataatgtgtaaatataattattggtattaatataattatattactcataataatattaatatctttggatttagattaccagtttagtatatgtttttctgtttctccctctttgatttccccttttttgctttttttttttttttaattcttatttttttttagtatttgttgatcattcttgggtgtttcttggagagggggatttggcagggtcataggacaatagttgagggaaggtcagcagataaacatgtgaacaaggtctctggttttcctagacagaggaccctgcggccttctgcagtgtttgtgtccctgggtacttgagattagggagtggtgatgactcttaacgagcatgctgccttcaagcatctgtttaacaaagcacatcttgcaccacccttaatccatttaaccctgagtggtaatagcacatgtttcagagagcagggggttgggggtaaggttatagattaacagcatcccaaggcagaagaatttttcttagtacagaacaaaatggagtctcccatgtctacttctttctacacagacacagtaacaatctgatctctctttcttttccccacatttcccccttttctattcgacaaaactgccatcgtcatcatggcccgttctcaatgagctgttgggtacacctcccagacggggtggcagctgggcagaggggctcctcacttcccagatggggcagccgggcagaggcgccccccacctcccagacggggcagtggccgggcggaggcgccccccacctccctcccggatggggcggctggccgggcgggggctgaccccccacctccctcccggacggggcggctggccgggcgggggctgaccccccacctccctcccagatggggcggctggccgggcgggggctgccccccacctccctcccggacggggcggctgccgggctgaggggctcctcacttcgcagaccgggcggctgccgggcggaggggctcctcacttctcagacggggcggccgggcagagacgctcctcacctcccagatggggtggcggtcgggcagagacactcctcagttcccagacggggtcgcggccgggcagaggcgctcctcccatcccagacggggcggcggggcagaggtggtccccacatctcagacgatgggctgccgggcagagacactcctcacttcctagacgggatggcagccgggaagaggtgctcctcacttcccagacggggcggccggtcagaggggctcctcacatcccagacgatgggcggctaggcagagacgctcctcacttcccggacggggtggcggccgggcagaggctgcaatctcggcactttgggaggccaaggcaggcggctgggaagtggaggttgtagggagctgagatcacgccactgcactccagcctgggcaacattgagcattgagtgagcgagactccgtctgcaatcctggcacctcgggaggccgaggcaggcagatcactcgcggtcaggagctggagaccagcccggccaacacagcgaaaccccgtctccaccaaaaaatgcaaaaaccagtcaggtgtggcggcgtgcgcctgcaatcccaggcactctgcaggctgaggcaggagaatcaggcagggaggttgcagtgagccgagatggcggcagtacagtccagcctcggctttcacaactttggtggcatcagagggagaccggggagagggagagggagacgagggagagccccttttttgctttcttttggattatttgaatttttccttaaatttatttatcttacttatttatttatttttttgagtgattctcctgccacagctcccaagtagctgggactgcaggcatgtgccactacacccagctaatttttttgtatttttagtagagacagggtttcaccatattggccaggctggtcttgaactcttgacctcaagtgatccacctgcctcggcctcccaaagtgctgggattacaggcgtgagccaccatgccctgcctttttctagaatttatatattgagttcttgattgtatctttttatgtaggctttttagtggcttctctaggaattacaatatacatacttttcacagtgtactcacatttaatattttgtaacttcaagtggaatgtagaaaacttaaccaccataaaaatagaactagggatgaggttaaaaaagagagagaaaagaaatgtaataaagatttaataacaccgtttttttttttttttctcttttttttttgagacagagtctctctttctgttaccaggctggagtgcagtggcgtgatcttggctcactgcaacctccgcctcctgggttcaagtgtttctcctgcctcagcctactgagtagctgggattacaggtgcgcgccaccatgcccagctaatttttgtatttttagtagagacggtttcactgtgttggccaggatggtctcgatttcttgaccttgtgattcgctctcctcagcctcccaaagtgctgggattacaggcgtgagccaccgcgcccggctaagtctttaaatatttttttgacattgcactttttctcttttccttctaggattttagtaacccaaatgttagttttgttattgtttggcaggttcctgaggctttccttacttctttaaatttttttttcctgttgttcagcttcgaaaatttctattcatctgtcttcaaattcactggttctttcccgttatttccattctgttattgagtctttgtagtgaattttaaattttgtttattatgttttttagttctaaaattttctttttttgtgtatgtcttatactttgctcctgaaactcttatttgtttcaggagtgatcttatttcttagagcatggttttagtagctacttaaaatttgttttatcatcccagcatatgtgtcctcttgattgtcttttctcttgtgagataatgggattttctggttctttatatgacaattaattttggattgtatcttggacagtttgacttacgttacatgattctgaatcttgtttaaatcctgtggaaaatattgaagtttttgctttaacaagcagttgacctagttaggttcagtccacaaattctaagcagcattctgtcggctctggttccatcatcagttcagttttgtatcttatctgcttatgtgcctttctgtgtccagtctgggacctggccaatggtcaggtcccaaagcctttgtacacttttagaagcagggccatgcacacccagctcacgagtggccccgggagtgcacatacaactcgacgttttcatgggctccttcttttctgtgatgtccctgacacgttctgccttctaagaacctccctttatccctttcctgttgtctggctagaaagtcagggctttagattccctatacttcagcacacttcctgtagctatgtcaacctctgtggccacgacttcttcttcttgggactgcagtttctcttgtcagaaagtaggattcttggagctgctgtcattgctgctgtggctgctctgatgctgcctgggagtcgaaggagagaaaggaacaaaacaaaacaacccaggggatttcctccactctctttgatccgtgagagccccctttcctgttcctcagaccagaaatagagggcctgtcttggaacttcttctttgtgcatctggtgtgcagtttcagcttttgagtccaggccaggaggtgctggacaaacttgtcaggagtacggaggtactgcaagttctgattacttttctcagtccacctgcttccaagtccttggatgcatttgtccattgttttgagttgcattccatgggagagacagaagagtgtgcttatttcatcttgacatacttattaggatttcatatcaaatcaacggatgatattctctatattaatttgctgttttccctttagcaagcacattaggaaaataacactttaacacccgcctttggtggtttctgtcataattattaatacttgactttttttttttttttgagacggagtctcactctgtcctttgaggcattgtccccataaacttttggtaaagcatcaataattttatctttcatccacacaagcttcaccataaatttgatgtttattcttccattttagcagaattcatgttgctccaataggggctgtcttcaaactgatgttttctccttcttagtgcctcagagtagatcctgttcagatacgttataacaggttaatatgagtttattttggtgtaaaagtactttgaaattcatgcatagttttttcatcatatgcattttccatagctttgaacacccccatgtaactctcctcttccacaaaccaaacaatgaaaaagcacctttgtgatggaagtttattttgcaataggaactcacagtgatctaagccctgctattcatgaatataattcattactggagtccaagttgctttttggtttttgaagttctcttcttcccttgcaggtatagaacaagatgcagtgaatacttttaccaaatatatatctccagatgctgctaaaccaataccaattacagaagcaatgagaaatgacatcataggtaagcagtgcttgaaactatggcaaaaaaaaaatgacaaaaaatgcacagaactgacaattttcgttattgactaagataattttttcttaacatggaatttagcagttcccttcctaatttgttttctgagtattttttatatcggattatagctcactttaaaagtttctcggctgcattcggtgcgagggtctttgcctgggccagatgggctgcagtgtagcgggtgctcaggcctgcccgctgctgagcagccgggccggcgggcggctacgctaaccggcacagaccaccggatggactggccggcagccccgcaccagtgcacgaagtgggcgggacagaaacttctggggttggaagtccagtgaggctaaaagccggtaccaaagtctctaggcatcagggctgcagcccaagagtctcacgaccagtgggcaactggatggccagacaggtgtctcagtggtggcctctccgtctcagggcttcatcccacttctcagtgggcctgacgtccctgggcaccctggatgtctacctgcattagccagagccatcacatggcctgtgacttgcctttttttgccagttgattgtgccacacacagtgtcatttctgtgtcatttggcacagctggaggtgcaaggaggagggcagcctcatgtccagtcccagtttcacgtaactttattcttctgaataaagacaatttgctaaccttaaaaaaaaaaaaaaaaaaaaagtttttcttatatgttggacccaaattcttaggctttaacctgaataacaatgacagcaagatcaataaatagtacacatttattaaacactcactgtgtcccagacaatattccaagcactttttatggatagactcattttaacttctaaagaactttgtgggataaatacagttattttatagatgaagaaactgaagcacagagaagttaagtgctttgtccagggtaacagctcagatatggcagagtcaggatttgaaactagaccctcacataccttaactgctgtgctgtggcagtgtttttcatactgtaggttgggaccagccttctcttatgccctcaccccctgccaaaaaaaaaaaaaaaaaaaaaaaatatatatatatatatatatatatatatatatatatataatatatatatatataaaatatatatatatataaaatatatgtattagtatatatgcatatatagtatatattatatattagtatatatactaatatataatatacatattagtgtgtgtatatatatatatactagaataaaaaaatcaaagtatctcagagtagtaaggacaaacatttcagaaaaatgttttcattatatatacatgtatgtatgtgtatgctgattcaacaaatatatttcttataggttatagcaaaatagtttgaaagcttttactgtgttttatcaggaagaccttaggtgaacgtatattcacagataaaagaggttatttattcattcaataaatattacattctcataagtcctaatattatgtatttttattcttcaaaaaagttagtatttgtgatttatgaaataagacatgttcttgcacttttagcagatctgtcccgatgttgggcttctttaatccttagtgtgggtgctttgcactcactcactgctggggacagcaagacccctgttagtctcagctgtgtttcttaaattggcccactgtaccttccagttagctattctggggtccatgtcatgttggctccattttccttttctttctcccacacagatacctataacggctataacataggcctggtggctgttggtggcttatccctatctgcttgtatttaaggggtactgtttcactgagttttgctgacagatgttgtcatgagatttgaggttttctgtgttgttgctctatttttatgtgggaatttgctactatcatcatccctagaccagcttttcctagtaatacaacagggatgttctgactgattagagtttgcctgtttgaagaattggttggctagtgatttttttttgaggggagtctgtaccagttaatagcctgactggcgtgtggataaaaaggaagcagtttcaagtcaaataaaacacttaaaatgaaaccacactgcaactctctttcttttacttaagcttaatcaaattaatgatgatgtaatcccatgaaggaaaagtcttctgaaggatcaagttgataacattttgtgatcaaagaatttgagaaaacctctatcccagtgtctatcattatatattttaggatgttaattacctgtgtggctttaggcaagtcatttttcctccttgagccccattcttaatcctgtccaaattatttgtctcctcttgcagttggactattttaatatagctgtccttcaagtgagttttgttcaaaggagccttcactttagctcttactgtgtacccactttgcatagtcttgttttaaatgtaatccttggatttttggtgttgctaactaattactgtttttatgtgaggatttagagtgatccagaatctatacttgcactacctccttcatcttccacaaatgtttgaagtggtagaatttttaaaaactttgaaggtacagctgacagaatttgctgatggtttggaagtgagtggtatgagagggaaaaaaaggaataaagcatgactgcattttttgtttgtttgtttgtttgtttttgagacggagtctcactctcgccaggctggagtgcagtggcgtgatcttggctcacggcaacctccgcctcctgggttcaagcgattcccctgcctcagcctcccaagtagctgggactacaggcgctcgccaccacgcctggctaatttttttttttgtattttagtagaaacggggtttcaccgtgttggccaggatggtctccatctcctgacctcatgatctactcaccttggcctcccaaagtgctgaggttacaggcatatatataagcatataaagtgtgttatagcatacaaacaggtatatatataaacatgcagtccacacagctgataggaatgaggcagtagtgaaggagaagttgatgtaggagaggggacagttgttacaggaaagaagtctggaggcagaagggatgaattccagtgctcacatagaagattgcttagatgggagcaaggacaatttatctagagtcacaggaaagaatgcagtacacgggtagagatgcaggtgagttgaaagatgtgagagatgatggaaataattttctgattgcttctatattctcaaggaagcaggaagcaaagtcctcagcaaagagaatagaagaggtgttaaatatttgagaaaggagatgtactgtagaaaaaaaaaaaactcagtttctccttctgaactctcacaaaacagaacccttccatgactctagttgtgtggggttttttccctgtcagctaccaattctgcagatgattgttcagtgaacaccaactgggtgtcctctaagtcagttcagttctcacactgtttacctggagatagcatcagatcccacagattgaggactctgtcccacaagactgcctccacttcagatgccagtctcaagtacaagttgtggcctgtgcttctgactgaccttctataaattggagttcccacagtcccctccttgggttcaataaatttgctagagcagctctcagaactcagggaaatgctttacatatatttacccatttattataaaggatattacaaaggatacagattgaacaggcagatggaagagatgcatgggcaaggtatgggagaggggcacagagcttccatgcactctccaggtcatgccaccctccaagaacctctacagatttagctattcagaagcccccctccccattctgtccttttgggttttttgtggagacttcattatataggcatgattgatcattggctattggtgatcagctcaaccttcagccccctcatcccgggaggttggtgggtagggctgaaagtcccaaacgtgtaattctgccttggtctttctggtgattagccctcatcctaaagctctttagaggccacagccacaagtcatctcattagccttcaaaagaatccagagattccatgaattttaggcgctgtatgctaagaaactggctaaaggccagttgcaatgtctcaggcctgtaatcccagcactttgggaggctgaggcaggaggatcgtttcaggccatgagatcaaaaccagcctggtcaacatagtgagacccccttacaaaaaatttaaaaattggccaggcgtaatagctcttgtctgtagtctcagctactcagaaggctgaggatcactgagccctggagttgaaggcagcagtgagccatgatcgtgccactgactccggcttgggtgacaaagtgagaccttgtctcagaagaaaaaggaaaaaaaaaaaactgggcaaagactaaataacatatttcacagtatcacagatttgtattgtctaggaaagtgaatgtaaacagaccaggacactagtatgatcccttggtttcatgaaggtcccactaaagtcatgaacacaaagtgagactaggcatcatgttatatggtttttccagccatgtttaacagctagctaaatagctaattgtttcgctgcagtttattttagcagttccttattttagcacatttcatgttttaaaatttctaccaataacattttaataaacttttttacagataacttcacaaatccataattttttaagttacaatcccagaaatagaattgctcattgaaagggtatgttcatttttaaagttatgctagaaactgccaaattgccttcagaaaaaggtgtttgtatccccactaacactagtgttagttttcttgtgcccttgctcaagtatacatattattaaaaacaatgttgggccagtttactagataaaaggtgtagtgcctccttattctaatctatttgattactagtgagtatgtatgtcttttcacgttggtcattttatgtttgttcctttgtggattgtcatgtcctttgctcatttttcttttggaacatttcttagtagtttataagagctcttggtattttaatgatagtaaccttttaactgtcatgcatgctgcaaatcttttttctgtttgtttgcctttgtattttgtttttggagggtttctatgtataggaattaaattttatgttgttaaatcttttgatttctgcttttgcatatgtacttcaaaagactttctattttaagatcaagtgttacctgtattttcttttagttctatttaaaacctcttaatttatatgcctgtgctgttaactcccaagttgattcacaagtgtgtatacatagtttgaatttagtggcaatttaattatttacaacttcttttgcagcaaggatttgtggagaagatggacaggtggatcccaactgtttcgttttggcacagtccatagtctttagtgcaatggagcaagagtaagttagttcatattttcacattgtgcatcctagggaatttgggttcattgttaggaatgggcttcactcagctaaaaacaaagtatttttgagaatttaaatattttggatatttacaagatcatataaagcatactctatcttggttaacagtttcttttaaatataaattatgtgaactcttaaaattttcattttcattttcaatgttaatatttcctaagttaaaataatttgtttttagttctgaaataatttggggagtgattgagtctgtagtgattatgactattagaattggtttatttatttaaataatgcatgtcttcagatggctctcctaatttgttagttaggctttaagctaaatggatgctatataactaaatccacatagatttgttgaaatggctccagaggttttttagatttattactgctatgtgcccttaaaaaaaatctattcattctttcacttaacatttatcagaagagtgctctgtgtaagacgtggttaggcatagtgccagtcttgaaggaagttacagcctaataaaagacatagggcatgttgtttggttactgtaatatgaagtggcatgtgttaaatgtcaggggagaactacaaagtcataaaaaggtgggagagattacatacaggtaaaggaatcaggaatgacaccatggggagtaaggtagtgttgacctaggcctttaagatacaatagggacagtatggaaagagtatatttttcccacttaaactctttccttggtcgttccctcaaattttcccttttgtccatgtgcaggcactttagtgagtttctgcgaagtcaccatttctgtaaataccagattgaagtgctgaccagtggaactgtttacctggctgacattctcttctgtgagtcagccctcttttatttctctgaggtaaagtctgcatttcttttcacactctattcgagcattccagcctctaactatcaatgctggggccctgtctataggaaataacacagaagagccaagtcatttccaaaaagatgtatcattgtttcaagttgtttctgatggcaagagtaatttaataatatattagagagaacatgaaaattcaatgtattaaataactctaattttgagaaacctaattaaactactgcatgtaagagagtgcatgtttttaattatttggagctattttaaaaccacagaatttgaaacttgcttccagtgcataaattgcagaccagacttcagaagagaaaaaaagtagtaaattttttcttatgctcatcatttttactttagtcacttgataggattgcccagtgaagaagcatttgcaacagacaatgagtatattaatctttttgaggcatacagtttagtataatgctctttgttaggcttcaacaagtgaaattattttgttggaaagcaaatgactattaagtagaaagaggattcccagtctcacaaagcagtaatttagacactcgattctgcctctttacaagaatacaggtactcagttgatttgttttctcactccctttctttgctataagtttaaatcaacaatttgtttaggttaatatgtcctcatggaatggtggaaatgatcagatataaaatatttggtttggttagtttactctttatatgtttgctggcaaggaaccacaaatccagtttagtataatttttactctagttcactaaaagtttgcatccagctgtgtaggtagtgtttgtttcttgttaacttttttttcgtctaaaagaatactttaaaacttttcaatctcaaatgactgtaacttgctgacaggtgttaacagaagaagtagatctttttgttttttgcttatgacctgtattttaatatttgagcttatagattagagattgtgagagaaatctgtttatagtcttattttcccttgtgtattttttcttcctagtacatggaaaaagaggatgcagtgaatatcttacaattctggttggcagcagataacttccagtctcagcttgctgccaaaaagggccaatatgatggacaggaggcacagaatgatgccatgattttatatgacaagtgagttatattgatagatggattcagcagatacttattgaacatttgatatgttttgtggaaataaagatgaataaactcagtctctgttgtcaaggagctcacaggaggcagcataaaagctgcttttatatggtgtttgtaaagctttgggggttcttagaacaaaagtttctgctgggaaaggggaggtgtatgtggggtaaacaggatggcaatggtggtgttcaaggagtgtttcccagaagagagattttgtttggatcccaaagaaagaagggaattttgctacccagagaaggcagaaaacaacattctaggcaaaggcattggcccagaagccatggaaacgtaggggaaagtggcactttcaagaaacttgagtttagataatcaaaggagtggggaataaatatgaggatgctggtactaattggaatagattgtaagggaccttgaatgcctatttatgggtatattatactttctgtataaatctgctcaggcacgttgttaattagttttttattagttttcactgaaaatgagaggatggaaacatcatacagtaaacaaaattgaaaatatctggtcaggcagatgatgagcttgtggccagctctgtaacgtatggtattcttttcatttaacttttcttactctgtaaaaaaagtaattcgtggtcgggcacggtggctcactcctgtaatcacaacactttgagaggcagaggcaggtgaatcgcttgagcccaggaatttgagaccagcctgggcaacatggcaaaacccgcctttactaaaaatacaaaaattagctgagcgtgatggcgtgcgcctgttgtcctagctacttaggggcctgaggcagaaggatcacctgagccttgggaggtcgaggctgcagtgagctgtgatccactgtactccaccctgggcagggcagtagagtgagaccctgtctccaaaaaaaaaaaaaacaacaaaggtaatttgttatttgtatccttaagcaaatgctaaaggggtaacttggggatagagaaaagtccacagatgttagggtttgaagacactaatagtatctaggccagtggttcctgaacattagtctgtgggctcttgctgggctgtctgcataggaatcacctgagagcttattaaaaataggttttcaggctggttgcggtggctcacgcctataatcccagcactttgggaggctgaggcaggcggattacttgaggtcaggcgttcaagaccagcctggccaacatggtaaaaccccgtctctactaaaaatacaagaattagccaggcatgatggcacacacctgtaatcccagctactcaggaggctgaggaaggagaattgctcgagcccgggaggtggaggttgcagtgagcggagatcatgccactgcactccaggctggctgacagagggagactctgtctcagaaaaaaaaaaaaaaataggttttcagtctgggtaccggtggctcacacctgtaatcccagcactttgggaggccaaggcaggcagatcacttgaggtcaggagtttgagaactgcctggccaacatagtgaaaccttgtctctactagaaactacaaaaaattaactgggcattttgacgggtgcctataatcccagctactagggaggctgaggcaggagaattgcttgaacccgggaggcagaggactgcatctcaaaaaaaaaaaaaaaaaaaaggtttccagtccccctgtctcagaaattctgattctgcaggtttgaggtgtgaccaggaatctttatttttagaagacataccagataattctgataaatagccagtttagggatgtagtctaattttcctattttgcaagtaaggaaaataaggcccagagaggtaatgattttctcaaagtcacagaacaagttagtggcagaatttggactggaatgcagttcttaatgttctgtccagtgtttattctggtacagtatgtttgtagaaggtattacgtaagaaacattgttatatagatgttgagataggaagagtttacatttagaaatttggtctaaaatgcctgaacattcaagtcgtggaggagtattgaccaacttactcaatacaacataggagattcacattttgttacaaaaatgctgatttaaaaggagagttttcttttttttcttcttttttattttttgagatggagtcttgctctgtcacccaggctagagtgcagtgacacgatctcagctcactgcaacctccacctcctgggttcaagcggttctcctgcctcagcctcctgagtagctgggattacaggtgggggccaccacgcccagctaatttttgtatttttagtagagacagggtttcaccatgttggccaggccggtcttgaactcctgacctcaagtgatccacccaccactgcctcccaaagtgctgggattataggcgtgagccactgtgcccagcctgcttgtttttgtatcatatatatgcatcatcataatcatgcattatcaacctttgtatttctgtcaggacatagaaaccattagagtgcttggaagagagcctttttttttttctcgcatttaatgctttttttggtattcatttcataatcagcttaccaaaacattacctgcattataccccatcaaggtagaaatctttgtgttatcaatattggttactccctttccacaccgagtcatcagtaagtcctgttctatccaaataggtcatatgcatctagctcacccctcagtgctgttttgttttgaatttgtacatgtttactcctgatgccttgtagttatgatgatgtgttcttattttattctgtgcatacaagttctcagctcgctttttagggaaaatgaccatgtcttcctttcctataaattcctttctatctatcaagtcctcaacagagaataggtacccataaatatgtgattgttagtttctttgcctcagttgtagtctgatccttacagcttttaaacaacagtagagttcaccgtcaagaactaaggatggttggcaggcagatagaaaggtagcaagttgacccaactatctctggggaagtgggaacaaagaaaggttacatcagcactgtcatcacatagctctatagttctaggcctgcaggctcaatcaagtagccttgtataagattctctggaggaggtgctgaaagttgcttatacttgctatggaatttgattttacttcggatatctttttaccataggtacttctccctccaagccacacatcctcttggatttgatgatgttgtacgattagaaattgaatccaatatctgcagggaaggtgggccactccccaactgtttcacaactccattacgtcaggcctggacaaccatggagaaggtaacccagaacttcaaacgtatcaaactacaagaagttttattggtagaactcataaaatataaggtgggaaaaccaagcagaatagcacagtggaaattgaagcagtccagcaaagtgattaagagcagaggccttgagtctggcctggtatgtacagtcacgtgccacataacattttagtcaacagtggactgcgtgtacgatggtcctgtacgattataatggatcaaagctggtagtgcaataataacaaaagttagaaaaaataaattttaataagtaaaaaagaaaaaagaaaaactaaaaagataaaagaataaccaagaacaaaacaaaaaaaattataatggagctgaaaaatctctgttgcctcatatttactgtactatacttttaatcattattttagagtgctccttctacttactaagaaaacagttaactgtaaaacagcttcagacaggtccttcaggaggtttccagaaggaggcattgttatcaaaggagatgacggctccatgcgtgttactgcccctgaagaccttccagtgggacaagatgtggaggtgaaagaaagtgttattgatgatcctgaccctgtgtaggcttaggctaatgtgggtgtttgtcttagtttttaacaaacaaatttaaaaagaaaaaaaaaattaaaaatagaaaaaagcttataaaataaggatataatgaaaatatttttgtacagctgtatatgtttgtgttttaagctgttatgacaacagagtcaaaaagctaaaaaaagtaaaacagttaaaaagttacagtaagctaatttattattaaagaaaaaaattttaaataaatttagtgtagcctaagtgtacagtgtaagtctacagtagtgtacaataatgtgctaggccttcacattcacttaccactcactcgctgactcacccagagcaacttccagtcttgcaagctccattcatggtaagtgccctatacagatgtaccattttttatcttttatactgtatttttactgtgccttttctgtatttgtgtttaaatacacaaattcttaccattgcaatagtggcctacgatattcattatagtaacatgtgatacaggtttgtagcccaaaagcaataggttgtaccatatagccaaggggtgtagtaggccataccatctaggtttgtataagtacactctgtgatgttagcacaatggcaagcagcctaacggaaattctgtttattgattgattgattgattgattgattgagacagagtttcactccattgtccaggctggagtgcagttgcacagtcttggcacactgcaacttctgcctcccaggttcaaccaattatcctgcctcatcctcccaagtagctgggattacaggcaggcaccaccatacctggctaatttttgtattttagtagagacagggtttcaccattttggccaggctgttctcgaactcctgaccttaagtgatctgcctgctttggcctccgaaagtgctgggattacaggcatgagctaccatgcctgggcagtaactgaaattctctaatgccattttccttatctgtaaagtgacgataatatgcacgtttacctcaaagttactttgatgattaaagtaaggtaatgtatataaaatacatattaacatagtacctgacacatggtaagcatcaaaaaatgttaactacttttattactattattattacgtatttttaaataattagagagcagtatcaaaaattagctgggcgtagtggcatgcacctatagttccagctactcaggaggctgaagctggaggattgcatgagcctgggaattaaaggctgcagtgagccgtgttcatgcccctgcactccagccttggtgacagagcaagaccctgtcttgaacaattaaagaaggcattatgccgcaacgttagcttagaaatgatccacatatatcaccagtaactgtcaacaggattggaaccctagttttgggtattatgatcacaaggtattattaatagcttattaataataaagcgttggctaggcacggcgactcacatctgtaatcccagcactttgggaggccgaggtgggtggatcacctgaggtcaggagtttgagaccagcctgaccaacatggagaaaccccatctctactaaaaatacaaaattagccgggcgtggtggtgcatgcctgtaatcccagctacttaggaggctgaggcaggaaaatctcttgaacccgggaggcagaggttgcagtgagctgagatcgcaccattgcactccagcctgggcaacaagagcaaaactccgtctcaaaaatataattataataaataaataaaagtaaagtattgatgtttgtgaatgatttattcttctaatgaactagaggagatttttccaggaatttcagagccagtgaggttatgttgcttgtatgtgtcatgtgtatccaggtgaaaaaacttaattaaacgctattatataataccatacataaaaactgaattttaggaatactgaagaatgacatatagaagtcaaatcattaaatagctagtagtaaacagaatagagtgtcagctgttacccaatgatgataatattttcacgattaaaattaaaccttttctgattttaaaggaaaagttcagatctgtatcatataaagaatgtaaattttcagggtaataaaattaaaatgcagagagaaaaatgcaaaaatagttcttactagatgtgtgtatgtaaggaacttagactaattttaagaacactgtcaagaccctggtagttaggtaggaaaaaagacatgaatgattcattcaacaaaaactttgagtatttctgtgctagatggtagtgttacagtggtaaacaaaataaatgtgtttctgctatcctggagcttagtctacaaaaaaggtacatattggccgggcacggtggctcacgcctgtaatcctagcactttggaagatcgaggcgggtggatcacctgaggtcaggagttcaagaccagcttggccaacatggcgaaaccccgtctctactaaaaatacaaaaattaactgggtgtggtggcggacacctgtaatcccagctactcgggaggctgaggcaggagaatcacttgaacctgggagacagaggttccagtgagtcgagatcatgccactgcattccagcccgggggacaaaagcgaaaatacgtctcaaaaaaacaaaaacaaacaacaaaggcacgtattaaatacgaacataaatatttacaaattatactgaataagttctcatgtttattatttgcttgtccagttacaaacttttccttcgtagaattagaaatataaataataaacatgagaactcattcagtataattaataattattaaatgtaaataaaaacatctatgtacaattaggcatttatttaagaattatttgaaaaaaaaacaatgtggaaacagatattttgatatattgctagtgattgaaattgataatgttcttttgaagagtaaagtgaccatatatattaaagttaaaatttaactcagcaatcacacgcctggtgagttatcttaaggaaatcagtttgaaagtaaaatcaatatatgcacaaagactttaacatttatcataaaccagaaaaatcgagtttcaaattatatcctatggactattttctgctaaaaagtattaatatcaactttatgtaatactttcgtgacaaatattttgggggagaaaacccaacaaaattacatgcattgtaattttttttttttttttttttttagacagtcttgctccagcgtccaggctggagtgcagtggtgcaatctcggctcactgcaacctccatctcccaggttcaagcaattctcctgcctcaggcctcccgagtagctgggattacaggcgctcaccaccatgcctagctaatttttatagtttttagtagagatggggtttcatcatgttggccaggctggtcttgaactcctggtctcaagtgatccgtctgcctcggcctcctagagtgctgagattacaggtgtaagccactgcacccagccttatgcattataattttaatttgtaaactgtacaaagggataatacttgtagtacaacaagaagtaaaaacatttgttataggtagttaacatttgtaaccagtagaattataggtaaaatttatttatttaaaacagttttagttggatttgatttcaactttaaaataatgcttttcatctctatcaggtctttttgcctggctttttgtccagcaatctttattataaatatttgaatgatctcatccattcggttcgaggagatgaatttctgggcgggaacgtgtcgctgactgctcctggctctgttggccctcctgatgagtctcacccagggagttctgacagctctgcgtctcaggtattgactgattgcgtctgccattagggagaaaagcatacacatcctttccttcacatcccagtaacagatcctattatttgtaaattttaagttgtggaaaaaaaagataaaagccaggcacagtggcctgtgcctgtaatcccagcactttgggaggctgcggtgggcggatcacacgaggtcaggaattcgagaccagcctggccgacatggtgaaaccccatctctactaaaaatacaaaaattagccgggcatggtggcaggcacctgtaatcctagctacttgggaggctgaggcaggagaatcgcttgaacccaggaggcagaggttgcaatgaaccaaaatcacgccactgcactccagcctgggtgacaaagtgagactgtgtctcaaaaaaaaaaaaaaaagagagaaataaaattagcctacttactatcttctaatcaaagcatttgtggtaacttaaaatatactgtattgtaaagtatcatgctgtttcatttaggccattattctatttgaatctgtggctgtttctcttaataaatcaagtaatatggaatatattcatagcctctgaagagctctttatgtaagtatttatttaggatactttttgtaaaataagtgaatgaattcttaggtctcctttttttttcttttcttgagacagggtctcctcgctgcaacctggaaattctgggctcaaataatccacccaccacagcctcctgaatagctgggactagaggcatgcaccaccacgcctggctaatttgaaatttttttttggccaggcatgatggttcacgcctgtaatcccagcactttgggagaccgaggcaggcagatcacgaggtcgggagatggagaccagcctggccaacgtggtgaaaccccgtctctactaaaaatacaaaaattagctggttatggtggctcatgcctgtaatcccagctacttgggaggctgaggcaggagaatggcttcaaccagggagtcggaggttgcagtgagccgagatcacgccactgcactcctgcatggtgacagagtgagactccatctcaaaaaaaattttttttttaaatgatggagtcttgctgtgttgctcaggctggtcttgaacccctgacctcaaatgccgcctgcttcagcctaagtttcttttttttttgtaaagagacagggtcttgctatgttggccagggtagtctcaaactcctggcttcaagcagtcctcccaccttggcctctcaaagtgctgggattacaggcgtgaaccactacctataatgttgtgtttcactcaaggccttttgatttcgttttgcattaccgtgccacattgtgcatttccttgaccttttttgggttttttggagtgctttcatatgttaaaccatacctgattctcctcaaaatcacacaaagtagaatatcctaagacaagaaatctaaggaggcataaagaagttaactggttttattaaactcacacagtaaatgatagagccagaaatattccccttctagtgttcttcaccatcagcttaatgtagcataataattttctaattactgttgacaaataaataaccctttgaattttcaatactgggccttggataaattttcctaatttgtaagagagtattatcgtattgccatttacaaagctctcctgagtatctttttcttctgttaagtttacctaggagataaactgctgagtatggttgccattttggttttttgatataggttagaatgtcttggttttttttttttttttttttggtttttgttgttgtcattgtttgagacagcatcttgctctgtcgcccaggctggagtgcaatggcacgatcgtggctcactgcaacctccacctcccgggttcaagcaattctcctgcctcagcttcctgagtagctgggattacaggcatgtgcaaccacacctggctaatttttgtgtttttagtagagaaggggtttcaccatgttggtcaggctggtattgaactgctgacctcatgatccacctgcctcggcctcccaaagtgctgggattgcaggcatgagccactgcacctggctgaatgtcttgtttttgattaggcacttaagaaaggcctaggtactaaccataaaatatatttttataccttttgttgatactatatatatagaaaactgcacttatcataaccttagacaccttgaagaatgttcacaagcagaactaacccatgtgacccagcatccagatcaaaaacagcattatcagcccctctagaagccctcttgggccccttccattcactgtccttcttgtcaccagggtagctactatcctgacttttgatggcatagattagcattacctgttcttgtcattttataaataaaaccatactgtgtattcttttcttgtacagctttattgtgctaattcacatttacatcatacaattcagtggtttttatatggtcacagagttaggtaaccattaccacatcgattttagaacatttttttcactccagatagaaaccccctttacttaaactccaaatcccccactccaccagccctaggcagccactagtctactttttatctctatagagacaatagatttgcttattctggacatttcataaacatggaaccgtatattatgtggtcttttgttgccaactgtctttcacttagcatcatgtgttcaaaagagcatcatgttatccatgtttggcatgtatcagaattttattcctcattatggccaaatatcccattgcaaggatttatgacattttatttgaattgtaccctcctttctgccatttatcaataatgctactgtgaccatttgtgtacaagtttttgtgtggatacaggttttctttttgtttttaaatttgaggtggagtcttgctctgtcgcccaggctggagtgcagtggcacaatctcggctcactgcaacctctgtctcctgggttcaagcagttctcctgcctcagcctcccgagtatctgggactataggcacgcaccaccacgcccagctaattttttagtagagatggggtttcaccatgttggccagtctggtctcgaactcttgacctcaagtgatccacccatctcggcctcccaaagtgctgggattacaggggtgagccactatgcccggctgtggttttcatttcttttgttgtatatacataggagtagaattgctgagtcaagaggtaactcttaaacttattgaaaaactgccagattgttttccgaaaaggctgcaccattttgcaatcccaccagcagtgtatgagttttacagcttctccacatttcattggaacttattatctgtttggctgtttttaaaaatgatagtcattccaataagttctacttcagtgtggtttttgcacttctctgatgagtaatgatgttgagcatcttttcatttgcttattggcctttgttctagctttggaaaaatgtttattcaaatcctttggccatttttatttttatttttatttatttatttttttttgagaccaagtctcactctgtcagccaggctggagtacaatggtgtggtctcagctcactgcaacctccgcctcctgtgttcaagtgattctcctgcctcagcctcccgagtagctgggattacatttcaggcacctgccagcatgccgggctgatttttgtatttttactagtgacagggtttcaccatgttagccaggctggtcacaaactcctgacctcaggtgatctgcctgcctaggcttcccaaagtgctgggattacaggcgtgagccattgggcccagcctagattttcttttttctttttttttttgagaaggagtcttgctcttgttgcccaggctggagtgcaatggcacaatcttggctcactgcaacctctgcctcctgggttcaagcgattttcctgcctcagcctccccagtagctgggattacaggtgcctaccaccacacccagctaacttttgtattttttttagagacagggtttcaccatgttggccaggctggtctcaactcctgacctcaggtgatccacctgccttggcctcccgaagtgctgggattaccggcatgagctaccaggcccagccaattttctcattatattgcccaggctggtctcaaactcctgggttcaagtgatcctcctgccttggcctcccaaagtgtggggagtacaggcgtgagccaccttgctcagcccctttgcccatttttaaattagattgcctttttatattgagtttcaggagtcctttatatattctagataaatgtcccttatcaaattatattatttccaggtattttcttcattctgtgagttgtctttcctctaccttttaaaaaaggtgggtttttgtttgtttgtttgtttgtttttttaagataaggtctcattctgctgcccaggctggagtgcagtggcacaatcacagctcactgccacctcaacttcctgggccgaagtgatcctcttacttcagcctcctgaatagctagggccatagatacacactatcacacccagctttttttttctgtttgtagagacagatcttactgtgttgcccaagttggtctcaaactctaggctcaaagtgattctcccacctctgcctcccagagtgctgggattacaggtgtgagccacacgcaacctgtcttttcactattaatagtgtcttcctgcttcagcctcccgagtagctgggattacaggcacccaccaccatgcctggctaatttttttgcatttttagtagagacagtgtttcaccatgttcacccggctggtcttgaactcctgacctcaggtgattcacctgccatggcctcccaaagtgctgggattacaggcgtgagccactgcacccggccaaaatattgccttcttaacagtattgtcttctaatttgtgaacatggatgtatcttcatgtatttatgtgttctttcatttcagcagaattttgtagttttcagagtagaagcctttcacctccttgggtcatttattcctatgttttaagttcttttcgattccattataaatagaattgttttcttaatttcattttcagattgtttgatgagagagcatagaaatacaagtgatttttacatgttgatcttgcaacttcaactttgataaatctgattgttagctctaatagttttcttgtggattctttaggattttcaatatataagatcatgtcatttatggatagagatagttttttttctggctagaacttacagagcaatgatgagtagaagtggcagaagcaaaaatctttgtcttgtttcctatctgacagggaaagctttcagtttcatcatttaatatgatgttaggtgtgggttttcaataaatgccttttttcagattcaggaatttccctatcattcctgattttttaaggcttttttttttttttaaatcatgaaagggtgttgaatattgtcatgttctttctgtatcagtataaatgatcctatggattttgggttttattctgttgatgtgaaatattaattgattttcagatgttaaaccaaccttgcatacctgagatgaatctcacttggtcatggtgtataatcttttcaatatgctgctggattccatttactggtattttgttgaagattttgtatctgaacgcttaagataacatttacactctatcagaaatgaattgaccataaatgtgagagtgtatttgtgggttcttgattctcttccattccaaagatagacatacatccgtctgtatgtctgtctttatgccagtaccatactctcttgattactattgctttgtaataagttttgaaatcagaaagtataaatgagattttggtatctgagtaacagtcctcatagaattagttgggaaatattccctctttattctggtccctctttcttttttgtttaactgtgtatcttggagattgttccttctcaacacatgagagccgctttccctaccctcccacccctgctatagagaggtctataagtgtctgttcaattattttatttacttaacctattacttagtcggggacattaagcttgtttatgtcttttattttaaacaatgctgcagtgaataatcttgtatataagtcattttccatcaatataagtctctctgtaactgaatttttagaagtggaatttctaggtcaacctatggctctgtatttcacaaaaataccaattctggtttttcttgtggaggtggggagtaggaggtagaatgctggaggagaacttgctgtactcagctggctagtcattttagaaaggtttccttagcttctttttgtcatatggcctcaccaagaatcaaaaacattcctatttaccctgtaaacatggggctttactacccaagatacatatttctggatgtatgacagcttttcatattgaagaaataatgctgtgagtacagcacatttgttggaacttaggtcgttaagaatgtcttataaattcatacattatacattttattttattttattttttagtttttgatacagagtcttcctctgtcgcccaggccagcgtgcagtggtacaatcttggctcactgcgacctccatctcctgggctcaagtgattctcatgtctcagcctccagagtagctatggttacaggcatgcaccaccatgcccggctaatttttttatttttagtagaaactgggtttcaccatattgaccatgctggcctcgaactcttggcctcaagtgatcggcctgcctcagcctcccaaagtgctgggatccttgtattgggtaaaagatgaatattgagggctgcatggtggctcatacctgtaatcccagcactttctgagactgaggtgggaggagtcctggagcccaggagggtgaggctgcagtgagttgtgatcgcgccattgcacttcaacctaggaattataggcttcagtcactgtgcccggcatgtacattttaatattgtgctttcctcttttagctatagtatgaggttacatttcagagtcattgttgttaagcatcttaatagtgatgaggttgagtgaaagttacttctatttcaaacactgaagaaaattttgtacaaatctgtcacattccaagcccaggactgattgtttcatatacttctaattttacaatttctattgtagtccagtgtgaaaaaagccagtattaaaatactgaaaaattttgatgaagcgataattgtggatgcggcaagtctggatccagaatctttatatcaacggacatatgccgggtaagcttagctcatgcctagaatttttacaagtgtaaataactttgcatcttttaaattttttaattaaattttacatttttttctaatctattattatatgcccagaactttcacttagagtgtgcagtataatgtggtggttaagtataaaggctctggagtgacttcctgggttttaatcttggctctgccatttattggcagccgctaacctcttggtatctcagtttcttcatctgtaaaatgagaataataaagtgaaaagatgccaacatcatttactctgggctgcataactgatacttggaaaaagtattcctttgagtttaagaattaagttggttattcattttagcttgtaataaaaagatagtgattcataggatatgccacttactgaaatttaccacagatccaatcataaaatcactttctcttccctaaagatagcttgattaacatgtaaaggtgtgtaaaggcttgattacactaccctgatccgtaccccagttcccagcagcaccatgaaaaagggatttcaacatatttaattactttcagtagaaagtaacagtggtaggccaggcgcagtggctcacacctgtaatcccagcactttgggaggccgaggtgggcggatcacgaggtcaggagattgagaccatcctggctaacacgatgaaaccccgtctctactaaaaatacaaaaaattagccgggcatggtggcaggcacctgtagtcccagctacttgggaggctgagacaggagaatggcgtgagcccgggaggcggagcttgcagtgagcttagattgtgccactgcactccagcctgcgcagtggagcgagactcttgtctcaaaaaaaaagaaagtaacagtggtattgggagactgaggagcctagaaagtacttgaaggaagtaaaaggtttgtttgaccacattgtatttggaaagccagctttttcagctgtgtcagctttgtgtagtgatttttagttcttcttttagaaaataacggacaaggccgggcacggtggctcacgcctgtaatcccaccactttgggaggccgagacgggcggattacctgatctcaggagttcgagaccagcctgggcaacatggtgaaaccccgtctctactaaaatacaaaaagttagccgggcgtggtggcgtgtgcctgtagtcccagctactccggaggctgaggcaggagaattgcttgaacccgggaggcggaggttgcagtgagccaagatcacaccattgcactgcagcctgcgcgacagagtaagactctgtctcaaaaaataataataaaataaaaaagaatggacagtaaacctaaatgagttcattcccaaagatgatgttattcttaagggatggttcatttatttaagaccttacataaagtctatcaattgcgtgatttttcacttctgtaattgtgtgtatgtataatgtaaatatatatgtttttgttttgttttggttttttgagacggagtctcgctctgttgctcaggctggaatgcagtggtgcaatctcagctctctgcaacctctgtctcccaggttcaagcgtttcttctgcctcatcctcccaagtagctgggactacaggcacgtgccaccacgcccggctaattttttgtatttttagtagagatggggtttcaccgtgttagccaggatggtctcaatctcctgacctcgtgatccacccgccttggcttcccaaagtgttgctattacaggcatgagccaccacacccagcatgtattttttaaatgtataaaatgaagcagaaaagagaaatgataatttttcttcatcttgaaagattatcttcaccaggcgcagtggctcacacttgtaatcccagcactttgggaggcctcggcaggcggctcacttgagttcgaaaccagcctggccgacatggtgaaactccgtctctactaaaaataaataaataaagatggttttaatatatgttttagttttatgattttagcatctttctgaaatttttctcaaggcaagtaaatttgtatcagttggtatattggtacccatctatgaaataacttattaggaagatatctctaaaataagatcactttgcctaaaataaactgatatattgatgttcacagaatttttcttttaaccgacttgataaatgcattattcttgacgtcaagtgatccaccttcctcagcctcccaaagtgctgggattacacacatgagccaccgcacctggcattattcttataaaaggttaaatttctagttaagtttaatgtcctctttgttcatgtaccattgcttattttcttcccttcctactcacagtaatcattcttatggtatgcacttttgtttgcttatttttatgtaattgatattacgctccattctgtacgttgtactttcattcacagtgagttttggacattcctatgttcatctatacagacttacttcattttaactacactgtagtattccgtatgtaatatttactataactcatcactgtagcagagcatctcatagtgtatgtattactgttttgccattttggtatcaatgagtatttaagtcatttgcagtttttccctcttatacccagtattacagaggatctctttttatatgcttctttgtaccaagaggcagattaaaaaatttttttttgaaaaaatttttgaaaaaaaatgaaatgaagtctcactatgttgcccaggctggtctcaaactcctaggctcaagcaatccttccatcttggcctcccaaagtgctggggttacaggcatgagccaccatgcctggcctacattttaaattttgatagctcttacaatttactttgtaaagtatctgcatcattttatgttctcaccagtctttaataagaatacttcatacttttggctggacacagtggctcacgcctgtaatcccagcactttgggaggccgaggcgggcagatcaagagatcgagaccaccctggccaatatggtgaaaccctgtctctactaaaaatacaaaaattagctgggcgtggtggcgcacccgtagtcccagctactcgagaggctgagacaggagaatcacttgaacccgggaggtggaggttgcagtgaacttagatcacaccactgcactccagcctagcaacagagtgagactctgtctcaaaaaaaaaaaagaatacttcagacttaattttttttccagtcttaagtgtttgctaatgagattgagtttcttttggtatgtctcttgattgttcaggttttttcttttatgaattgactgttcatctctttttcacattatttctgttgggtgattttattagtgacttgttaaaattctgtatattttttcagcatgacacttcattattcaaaaaaaaaaaaagattctctatgtttctcgatactaatcattggttggtaataccttaaaaataagacccttactgtattttttgcttttttttttttttttttttttttttttttgagatagagtcttgctctgttgcccaggctggagtgcaatggtatgatctcggctctcagctcactgcaactgcaacctctacctccctgtttcaagcaattctcctgccttagcctcccaagtagctgggattacaggcatccaccaccacacccagctaatttttgtatttttagtagagacagggtttcaccatgttggccaggctggtctcaaactactggcctcaagtgatccgcctgcctcggcatcccaaagtactgggattacaggcatgagccacagtgcctagccactttttgctttttaactttgttttatagtactatagttttagtataaacagatgtatgtatacacacaactatggctttataatatgtttcagtcattgttagagcaaggcctaccttttgggtgcttcttttacaaaattgtcttggctattcttgtgccttttttcttatttgtgaattttagaattgtgaattacctgttgactcaccatgttttgtaaactgaggattttgaatggaattgcactcaattaaagattatcttgctttctgtgcagcaatgttttatttcaaataatccctactttaaattacttaggatagctataaattgtgtttctggctttctagatttagatgaaacgctttaaattgattgttttctcctaaatttaaaactgattgttagaagttaaagtcttctgttcattcttatttaggaagatgacatttggaagagtcagtgacttggggcaattcatccgagaatctgagcctgaacctgatgtaaggaaatcaaaaggtttgtggtgtttttatacttcatattaagcctttactcacattagtgattgactgtaagtcaaagaccacttaaggtttaaactgtttattttgtaaagtaaccactgtatctttcaccttgtgtttatagtcagaagtaagtacaagggcttcctgtagtcacatctttatgcaatctcctctgaatcaaaagttagtgaacttgctttgccactccagaaggcacatgaatatgaaaaagcattgtctattttcttatttaatggcaaaatacccgacctaagttggacttaatgtttgagaccgtttattttattaaattatattttttctcttttcttttttttttttgagacagttcttgctctgtcacccagaccggagtgcagtggtctgaccgcacctcactgcaacctctgcttcctaggttcaagcgattttcctgcctcatcctcctgagtagctgggactacaagtgcgcaccaccacacctggctaatttttgtatttttagcagagatgaggtttcaccacgttggctaggctggtctcatactcctgacctcaagcaatccatccgccttggcttcccaaagtgctgggattacaagtgtgagccaccatgcctggccttattaaattatttttattaaatttcctcaagattgatgaaagtaatgaaatataaaagtaatgaaatatatgtggaaaatagactggattaagaaaatgtggcacatatacaccatggatactatgcagccataaaaaaggatgagttcatgtcctttgtagggacatggatgaagctggaaaccatcattctgagcaaactgtctcaaggatagaaaaccaaacaccgcatgctctcactcataggtgggaattgaacaatgagaacacttggacacagggtggggaacatcacacgctggggcctgtcgtggggtggggggctgggggaggaatagcattaggagatatacctaatataaatgacgagttaatgggtgcagcacaccaacatggtacatgtatacatatgtaacaaagctgcacgttgtgcacatgtaccctagaacttaaagtataataaatttaaaaaaaataaatatatgtggaaaatattaataggtcaaaattcaaattgttcatttaatcagaagagtagtttagtcaaatccaagggttagacaacagaaatcttttttgtcaagtgcattctttgtgactgatttcattttcttcctggtttacacaggaagatttcagaaacaaatgtggatccgtgacagatggtatctagaagtttttagtttggttgaattgacagtattttattgagtaaaagatactaatttttgtaagaagaaaaattcaattttgataagtatgtttaagattaagagctattggccaggcgctgtggctcatgcctgtaatcctagcactttgggaagctggagcaggtgggtcacgaggtcaagagattgagaccatcctggccaacatggtgaaaccctgtctctactaaattagccaggcgtggtggcacatgcctgtgcacccgcctccgggtttaagcgatcctactgcctcaggctcctgagtagctgggattacaggcgccatggctaatttttgcatttttagtagagacagggtttcactacattggccaggctggtctggtctcaaactcctgacctcaggtgatctgcccgccttagcctcccaaagtgctgggattacaggcatgattcaccatgtctggccatttatcttattttcttttttttttttttttttgtttgagacggagtcttgctgtgtcgcccagagctggagtgcaatggtgcgatctcagctcactgcaacctctgcctcctgggttcaagcaattctcctgcctcagtcttccaagtagctgggattacaggcgcgtgccaccacatctagctaatttttgtatttttagtagagacagggtttcaccatgttggccaggctggtctcggaactcctgacctcgtaatctgcccacctcggcctcccaaagtgctgagattacaagtgtgagccactgtgcccagccatcttattttctttctttttttttgtcgggtgggagggggacagagtctagctctgtcgccaggcttggctcactgcaacctctgccccccaggttctagcaattattctgcctcagcctcccaagtagctgggattataggcacctgccaccacgcctggctaattttttgttatttttagtagagatggggttttgctatgttgaccatgctggcctcaagtgatccgcccaccttggcctcccaaagtactgggcttacaggcgtgagcttgtattgggtaaaagaacaatattgggggctgcatggtggttcatacctgtaatctgagcactttgtgagactgagatggaaggagtgttggagcccaggagggtgaggctgcggctgcagtgaattgtgatcacgccattgcacttccacctaggtaatggagcaagaccatgtctctaaaaaacaaaacacaatttttttaaggaatactgggaagaggtcagtggtggttttagaacagaggaagtgccagatgacctttgtgaggcattggccaggaagaactctacagtgtctttaggtagcttctgtccataaggataatggggtctcctccccagtattaatagaaaatctctgagctgtttttttttgtttgtttgttttgtttttttttcctgagatggagtctctctctgtcggccaggctggagtgctgtggcgcgatcttggctcactgcaagctctgcctcccaggttcacaccattctcctgcctcagcctcccaagtagctgggactacaggtgtccaccaccacgcccagctaattttttgttatttttagtagagatggggtttcaccatgtcagccaggatggtctcgatctcctgacctcgtgatccgctcgcctctgccttgcaaagtgctggagttacaggcgtgagccaccgtgcctggcctggtttttttgttgttgttatttatttatttatttatttattttttgagacagactctcgctctgtcgcccgggctggagtgtagtggcacgatgtcggctcactgcaagctctgcctgccaggttcaagccattctcctgcctcagcctcctgagtagcagggaccacaggcgctcgccaccacgcccggctaattttttgtatttttagaagagacggggtttcaccgcattagccaggatggtctcgatctcctgatgtcgtgatccgcccacctcggcctcccaaagtgctgggattacaggtgtgagccaccgtgcctggcctgatttttttttttttttaatctggtctcatacctctgacagctcatgaagaagtgctcctgcttcatatgtatatgtgttagcatagtgttaacatagcataggtgttcggtgtttgcagtttctgtttgttttatatgaattaaggtgtattatgagcagttgaagatatataggaaattttttcccaaaccactatctctgctcgttctattcattcagtctgtttatgttattccttcattcattcattttatagaacagtggagtgcctactgtatgcatctattgttctgggtcctggggaagaaaacaaagttcctgctttcatggaacttacattatattggcggagacagtaacagacaaacaaatgtagcctgtgtacatgtgttacatgaaaagcagggtagggggctgggagagagtagtagggagtgctattttcgaggtggttgtcaggaaaggcctcactgaggaggtggcattttgagtagacctgagcgcagcgggggcgtaagcccaggcagcatgtggaggaagagtgttcttggtgaaaggaacaaggatagaggcccgaagctagagagctcagcatgatcaaggaacagcaagccccgtgtggctggaatggagtgagcaaaggaatgagcagtagaaggtgagtgagttgggaggtcaccagagaccatggcaaggacttgaaagtgtcagggacacattggaagttggagcagggaaatgatgggatttatgttttgtttttgttttatgtttagtgtttttaagggattgctctatcagctatttggaaaatttagtgtagggcttcaagaagagaagcagagaaacaacattcttgccatagtcatagtctaagtaagggatgatggtggtgtggattaggctggtagtggaagaccagtccagttcgggttgtatttgaaggtagaggcaaaaagattatatttctaccagcaagcccatctatgaagttacttgtattattaatttaattgagacatgcccacataaactaataaataggaatttctgcagtttggttaaacacccctgtatatcctggttcttcttttagttgtccagatgtctctttaagtcaagtattttttggtggtgtaggagcctagagattgaatttattcacccaaaaggcatttgagtgattactatgtgccaggcactatgctgaatgccaaggatgtaaataagagggcgtagtctcagtctgttttactccagcttggttcctttttaatgaccctgacttgttaagcatatcagttatcctacagaatgtttaatcttctgtactttcctggttgtgttatttagcttatttctctttccttgacatttcttgtaaactggaagttacacctatagtcttgatgattcgtgttacacattttagattagaacacatcatgtgttgtatatggtgtttttgaaagcctctctgtatattggtctgtacattaaaatgttgcctgaatggatacacataaaatttaacagtgattacattagagatgagaagaaagaggtgccttttacttttcaatataccttttcctctgctttttgaactttcttgccctatgcatacgttattgcttaatcatccacctcatctcttcccctgtggctttctgttgcatttggaatgaaatctagcctctttgctgttacctgtggatgtcccttgctggcctctatcaccttactttgaaccactcctttcatggactgagctctcattggactatcttttattcttttgctgaagtttcttcactttgagtgcctctgcagttgctatttcatggctgtggcaagccctgccatggctttcatgcaaggatggttcctccttctcatctcaatattatctcttcagagagggaccttcccaactccgatgatctaaaatcctttgtatataccactcactaccacttctttcttttcttttccttttatcttttttttttttttttttttttgagatagggtcttgctctgttgcccaggctggaatcacgactcactgcagcctcatcttcttgggctcaaatgatcctctcacctcagcctctcgagtagctggaactgcaggcacacaccaccatacttggcttattattttactttttgtagagacagggtttcaccaaggctggtctcaagctcctgccgcaagcaatccacatctctcagcctcccaaagtattgggattataggagtgagccactactcctggcctattttcttattcactgtctaaaattatcttgttcatttatttacatacttgtttatagcttatttctcagctggacatggtgcctcacacctgtaatctcaatactttgggaggctgggttggagaattggttgagcccaggacttcaagaccagcctgggcaacaaagtgagaccctgtctataaaaaattgtttaaaaattagctgggcatggtggcacatgcctgtggtcccagctacttgggaggcagaggtgggagaatcgcttgggcccaggaggttgaggcgacggtgagccatgattgtgccactgcactctagcctagtgacagagtgagaccatgtgtctaaaaagtaaataaaaatagtttctctttcatgactagaatattacctctatgtgggcagggagtttgtctatactatttggcactatatttcctgattctgaaattatgcctagcacatggtaagtactccttaaatatttattgactgaattatttaatacttaagaatttcatttgggattatctgagtggtaagattacggattatatttatgtaagaaaaaatcattttttaaacttggttgccctttgccacactgacatagacactaagttttcttagccagattacttccgaggatactcacagaggccattctcttctcaatccccaaataattgatatttcttagcactttcaagctaatgcaattcttagatgatgtatctgtgtatatcatatcctcattctacaaatgtagaaattgaagtctgggcacagtggctctcacctgtaatctcagcagtttgggaggccaaggcgagcggatcactgaggacaagagttaagaccagcctggccaacatggtaaagccttgcctctattaaaaatacaacaattagggccgggcgtggtggctcacgcctataatcccagcacgttgggaggccaaggcaggcagatcacgaggtcaggagttcgagaccatcctggctaacacagtgaaaccccatctctactaaaaatacaaaaaattagccaggcatggtggcacgcgcttgtagtcccagctatcgggaggctgaggcaggtgaatcccttgaacccgggaggcggaggttgcaatgagctgagattgcaccgctgaactccagcctggtcaacagagggagactctgtctcaaaaaaaaaaaaaaaaaacaattagccaggcgtggtggcgggtacgagtacctgtaatcccagctactagggaggctgagggaggagaatcacttaaacccaggaggtggagtttgcagcgggctgataatgcaccactacattccagcctgggcaacagagtgagactctgtcttaaaaaaaaaaaaaagaaagaaagaaattgaggaatgtggagattgtggtctgtgatttgttaggaatcacacagcaggttagtagcaactacagggctttggttcagaataccaccttgacaatggtttgtttacagttcggctccccttcctctgcctttctctccttccttattgagggcagctggaaagaattttcatcatttactagcctatagctttaatttgagttttgaaaccttgataatagagcacagaggaaaagactgagttttctttttttgagacagtcttgctctatggcccaggctggagtgcagtgacaccatctcagctggttgcaacctctgcctcccaggttcaagcaattctgcctcagcctctcgagtagctgagattacaggcacgtgtcaccacgcccagctaattttctgtttttgtttcgttttgtttttttctgagatggagtcttgctctgtcacccaggctggagtgcagtggtgcgatgttggctcactcaaacctctgtctcctgggttcaagcaattcttctgcctcagcctccccagtagctgggactacaggtacgtgccaccatccctagttcatttttgtatgtttagtagagatggggtttcactatgttgaccaggctggtctcgaactcctgatctcaggtgatctactcgtctcagtttcccaaagtgctgggattattggcacacgcctatttttgtatttttagtagagacggggtttcaccatgttggttagactggtctcaaacttctgacctcaagtgatttgcccgccccagcctcccaaagtgctgggattacaggcgtgagccaccgtgcccagccaagattgagttttgaaaagagccttctgagattatgagaagggcaagcaagataacttaagaagttacattaaaatcatctaagagacagtgtaacaagaaggaattgtaaaatgatgttatgagcacgtgcccaatgtagtggcaatcccttgtgcttcgatacattggtgggagacaaaactgtacttaaattgataaatcccttacatgtcattttaaggagcttagactgactcccatcatgtagacatcagagatttcttttttttttttttttttttttttttttttttttgtgacagagttttgctcttgttgccgaggctggagtgcaatggcgtgatctcggctcaccacaacctccacctcccaggttcaagcaattctcctgcctcagcctcccgagtagctgggattacagccatgcaccaccacgcctggctaattttgtatttttagtagagacggggtttctccatgttgtggctggtctcgaactcctgacctcaggtgatcctcccgcctcagccacccaaagttctgaaattacaggcgtgagccaccgcgcccagcccagagatttctaaacagagttctaaccagatgcttttccctgtcagtagaatgagaatgaattggaggtgggagagactggcatgagggacaccagtcagccagtggaattagctggtaatgttgataggagaagaaaaagattcaaagttaggtagtggtagcaagaattagagggaaggtcggatttatgatatgtccaaggttgaattctaaggtgaaatttggtggcagatttcatgtgtaaattgggaaggtagattgagtttttttaacatgggttttctaacatgtcaatagagtgactctgcaggggggcctgacgagagaacagtgcatggggtgattcaacagccagttgagccttcatgcagagcatttaacactgtgactctgtagactctggttggcagtaaaatttcattaaaccaatatttaaacccttaggtaataataaaaattgagggaaaaggatccaggttttgtattttttatgaattcagttattgaattaaacaggaccttgcctcaagaaataatctaccaacaattaacttgttttaaagcaaagttaggaagtgagcatgttcaaattattaaataaaaaagtaagctgtgtatttcattcatagaaatagaggctggcctacttcggatgattctcagcatgtgattacagatgtgggcttatacatcctagggagttaaggcgtactctggcttggatagagtagagctctttgaaactcttctctcacccagctagtttatatagactagagaactagaatgtagcagcatactctgtcttagaagcccttttatataggagctggtctggaaggtttgaaaacataacaaatgtgttggtgtctcccaatgtattgctagattcttacccaagagcattatcctggttagggtttggtttggttttgttttgttttttaatgtttgccacaaactaacactagatgttagttctttcatcaagtgaggagagtagaagaaaagtccagaactctgaaacaccttttcaaaagtttttcaagccatgatgtttgcaagttaaatgctctgttatgtaagcaatataatcagtttttattaatgtaacattccttagtgttttggggtatcacacaaaaaagaatatccatatctggaagcaacagcttttaaataagagcattgtggtggtggtggtgatagtggtttttttttttttttttgagttggagtctcgctctgttgcccaggttggagtgcagtggcacgatctcagctcgcttcaacctctgctcccaggttcaagcaattcttctgcctcagcctcctgagtagctgggattataggcacctgctaccatgcctggctgatttttattattttagtagagacaggtttcaccatgttggccaggctggtcttgaactcttaacctcaggtgaatcacccacctcggcctcccaaagtgctggaattacaggcatgaaccaccatggccagccaaataagagcatttttaatgtaaaattatgcatgaaatgtacattcaattttgtctttgtttactaggatccatgttctcacaagctatgaagaaatgggtgcaaggaaatactgatgaggtaaatcctacctttaggataaaaagatttctgtttataagtgccaccctcatgtaagtgaggtttaaaattttccttttctttaggtcccatgtttaagcagcatggcacatttatgttctcttacccagaatgtaccaagaaagggtggtcccttcttaacatctaacaattgcctggtagtagcagtgaaggtatcttcagtcagaggctaggaccactgaaggatatacatgcattcaagtttccatcagccagcaggcatcagtaatcagtgtgtagatcaaaagctcaaatgtttccttccccactggcagttttacttcaagtagtggaggcttgcttttttaatagttaattaagtacattgagagatgggaggtgaaaaaaggaaaatgttttattttgaccatctaatatgaaagtagttcggtgttaggtatccagtagttgacactggaagacagggaatgacatgttaatattcatagccagagggtggcccaggttttttcgtacatgggaatgaaattcttatccaaataagtagaaattatgtgcgtaagccatttgttaagagcactgagtatgtgcatctcgatccatctaatgaataaccattatcaccagtttaaattattttctttaggcccaggaagagctagcttggaagattgctaaaatgatagtcagtgacattatgcagcaggctcagtatgatcaaccgttagagaaatctacaaaggtaaggatgacttcgttttgtgtaaactaaaaagtattattttccaggtgtaaaaataaaaaagaacataaggggtttctttgcctttgaaggattaactgctgtggggattaccttcttatcataagcaactagaaaattgacaaactaaatgaaacaactgtttgcatatattggacaatgggcaatacagggaaaccatggaaaccaaacagagcccagtagtcttgctgaacgaaagagttaaatatcaaagttcaggccaggtgcagtggctcacgcctgtaatcccagcactttgggaggccaaggcgggtgaatcacttgaggtcaggagttcaagaccagcctggccaacatggtgaaaccctgtcttagccgggtgtggtggcaggcacctgtaatcccaactatttgggaggctgaggcaggagaatcgcttgaaccagggaggcggaggttgcagtgagccgagatcacaccactgcactccagcctgggcgacgagcgaaaccccatttcaaaaaaaaaatcaaagttcagagagctcaatttgagtagaagttgtaggataaggtagcagaaaagaggaagctgcccagaaagaaagccgtagagatatttagagagattcccatggatccttggcctaggagtgatctgtatatgtgtggggtgaaaacgcatgtgtccaggtagagaaccccccagaaattagtaggctgaatgattgctggaacatagggctaagaaaagttcatggccagaaggatctggccagagtagagagacttagtaatacacaaggcattgggtagtgtcttcacagaggttatgccttactactgaagataaattagtcctagagtacaagcacctgaaccaagtttcaaagcaaatttttaaagggtcaaattacctaacaactgcatgccaaaacaaaggcctaaccctctttacagtaacacaacaaaattcagcacttcacagtgtaaagttagaatgtctgacgtccaggctgggcgcagtggctcatgcctgtaatcccagcactttgggaggccgaggcaggtagatgacctgaggtcaggagttcaagaccagcctggctaacatggtgcaaccccgtctctattaaaaatacaaaaacttagccaggcatggtggccggcacctgtgatcccggctacttgggaggctgaggcaggagaattgcctgaacccaggaggtgaaggttgcagtgagccgagatcgcaccactgcactctggtctgggcaaaaagagcaaaactcaggctcaaaaaaaaaaaagaatgtctgacgtcaatcacaaattaccaagcatgacatgaagttgacctataaccaggagaaaactcaatctatagaaacagacccagatgtgagaaagatgatgaatttagcagacaaagaccatcaagtggctattttaaatattaaaaatatgttcaagtggccaggtgcagtggctcatgcctgtaatcccagcactttgggaggccaaggtgggtaggagttcaagaccagcttggccaatatggtgaaaccccttctctactaaaaatacaaaaaaattagctgggcatggtggcaggtgcctatagtcccagctatatgggaggctgaggcacaagaatcacttgaacccgggaggtggaggttgaggttgcagtaagccgagattgtgccacttgtactccagcctggacaacagagtgagactctgtctcaaaaaaaaaaaaaaaaaagttaaagaaaacaagagtataatgagaaaaatgcaaaatagttttaaaagaaccaaatggaatttcttaaaataaaaaataccagaaatgggggccgggcgtggtagctcacgtctataatcccagcactttgtgggggctgaggcaggcagatcacctgagatcggtagttcaaggccagcctgaccaacatggagaaacctcatctctactaaaaatacaaaattagctgggcgtggtggcgcattgcctgtaatcccagctacttgggaggctgaggcaggagaattgcttgaacccgggaggcagaggttgcggtgagctgagattgcaccagtgcactccagcttgggccacaagagtgaaactccgtctcaaaaaaaaaacaaaaaaaaacagtagactcgaagaactagctgagtttttctttactttaggcagtaagtgtgaccttttgcaggtgactactttagttcctcatgtcctcattagtagatcagagaaattcgacaccaaaaccccaaaagaaaaaccccttctaatcctcattccatgattttatgaatgcatgaagtcctaggcctgcgaaggaatactcattctctttatcctgtgttgatacctctctgcttcaacctccaactcgacatttgcctataggatgtacttggacattcagcataaactacctcacaccattactgaattgcttcatgtgcacatgtcccatgccacaataccggggaccttgtcttccgtgatatttgtccgcagtgctgtgactacaggagggagtcagtgaatgtctgcatgtgtgtctttaccatccctcttgaatatgctctagggttaattcctagaagtagaattactctattgaaaattggcaatatttttcattctaatatctattgccaacatgggaaagcaagtctggatgccagtccttgttatatgccccttgggtaagttacgtaacctctttaagcttctgttcactcatattttaacaaggaaaattacaatattttacctcacaaaattgtagtcagcttctggctgtcttaaactctggtatatagtaaacactaagtgttggtgtccatccttaatttgtaataataggtcacttgttagagaaatgcaccttaccattttcttttcttttcttttttcagttatgactcaaaacttgagataaaggaaatctgcttgtgaaaaataagagaacttttttcccttggttggattcttcaacacagccaatgaaaacagcactatatttctgatctgtcactgttgtttccaggagagaatgggagacaatcctagacttccaccataatgcagttacctgtaggcataattgatgcacatgatgttcacacagtgagagtcttaaagatacaaaatggtattgtttacattactagaaaattattagttttccaatggcaataacccatttatgagagtgttttagcctactggaatagacagggaccacatcctctgggaagcagataagcatagaactgatacttgatgcacactcgtagtggtaactcatccctaatcagcattgtaaagcaggtgccagaggtggtttgctttgtccttccaaagcaggtgagtcagccccaccgagagccaggcagctttgagtggcagcgtggtgctagcagcttcagcggaacagggtgagagttaattatgcagtcttcttgacagcggcattaatttggaaggaaactgacaagtcatgggtcaagtttcagtgacttcctccttcctctgatggcagtatatagttttcacattttaattcctcctcctgagatgcactatacttaaaaccattctctcccctgctaacagaagggtgtgaatctggtttactttgagcattaggatttgcccctttggaattctgcactccagttacttaactttcccttcagaatacatgtggaaagaaagaaagaaatagcgatgactccacttttgcccctgtggcaccttgaacaaagcagttcttcccaaattatactttttttttttttaaataaggtgagcaggatgactggggagagagaaacatttgactttgactgcctcccccattctttgctgtgagctggaaagtgtgcagttggtcgtctttcttctcctttctttaggatagtaagagactcactcactgcacttctgctcagttggcttctgcatcgggatcacacagccatcagcaggactgcccagttggtgagcacactccattgaccacgtggcgccagcgcttcctcaatgcacatgattgagaggaaagaaagttctcttagatgttactgcttttgctcagactttgcaaaaaaaaaaatatatatatatatgtataaatatataattattaatcacttttgtccttgagaaagtcttgaatgaacagagaatttattccattgcaatatttgattgtatagaggcacactgtttcatcgacagaagaagcaaaaaggctttgtgtaagtttttggtactatgtaccacctctgttattcttttaaagctgaagtattcatgtacttaaaccatattatatttaattgtgtttgattttaaaatatatatatatgaattctatttaaaattgtgtcaactttctgctttcagggcatttatggctcttctgttgaaatatattgatctttccaaatattttcatttgctttctaaaaacccagaacatgagccactactggactttgccttgtgtttgaagtgtatggcataaacccaaggtttttattagtcatctatgctgtgattaattcattttgttcttttaacaaaatatttccatccacttcacattgcttcaatctttaacagaaaagcaatataaaggttatagaataaaatgtggttttgggcaactcttgctgcctctgcatgttttggaataacaatttctacaagactctaggctgtttaaactagtgctttcagttaagataaattctaatcatttctttgtatatacattttgtgcttctgagctagagatgccaagtagttgtaaactgcttataaagagaatagcagcaaatttgagactcggctacttttttctgccccacctgctttgagacacagaagcggagtgtggcccgaaattattagccagatttaatatttgatctaaagtaggtccttgtactcattttaaagttggaatttgattcctccaacattgagcacccaccatgttccaggctctgtgcattgtgcccacaaaataagattccctggtggagtttttatgggttcaaataatcagttgaacacccttcatctttatcatgttgttgacattgacacaaattgtttaaaaagaaaagatattagagagaaagtggtacctttgtaacttgatgtgtcttcatcattcggtaagatttgatgaaagtaaaaagcaaatgtcagccaaatccagtgaacagcaataaaacagggagtaactttttataactttttctacttggatttcaacattcagtagagcttttcgaaatgtaagtagtttacagtactggaggtttgactagttcagtaggaatttggaggggaaggtcattctgaattgtaacaaagtacaaacttctttgctgttttatttaagtactgagagctaagcacctgatgaagtgactgacctctctccagtgacagtgtttgggtacctgcctgacttcaggagtggggtttatgtttctacacagtgaccttttctctcgccctctcctccctcttgcccacacaccagttgattggacctgggttgaactcctgatccagacaggcccaagacagttcttaatgttaagaattttggggccgggcacggtggctcatgcctgtaattgcaacactttgggaggccgagacaggcggatcacttgaggtcaggggttcgaggccagcctggccaacatggtgaaaccctgtctttactaaaaatacaaaaattagctgggcatggtggcgcacgcctgtaatcccagctacgtgggtggctgagacaggggaatcgcttgaacctggaggcggaggttgtgcaatgagccgagaccgtgtcactgcattccagcctgggtgacagagggagactctgtctccaaaaataaaaataagaaaaagaattttgggctaggtgcagtggctcacgcctgtaattacagcattttggaaggcccaagatgggcagatcacttgaggacaggagttcgagaccagcctggacaacatggtgaaactccatctctactaaaaagacaaaagttagccagatgtggtgatgggcacctataatcctagctcctcgggaggctggggcaggagaatcacttgaacccaggaagcagagattgcagtgagccaagatcacatctctgcactccagcctgggcaacagagcaagactctgtctcaaaaaaaaaagaatttggccaggcgcagtggttcacgcctgtaatcccagcactttgggaggccaaggcaggcagatcacgaggtcaggagatcgagattgtcctggctaacatggtgaaaccctgtctctactaaaaatacaaaacattagccgggtgtggtggtgggcacctgtagtcccagctactagggaggctgaggcagaggaaggatgtgaacccaggaggcggagcttgcagtaagccaagatcgtgccactgcactacagtctgggcgacagagtgagactccgtctcaaaaaaaaaaagaattttggccgggtgcggtggcacatgcctgtagtcccagcactttgggagaccaaagtgggcggattacctgaggtcaggagttcaagaccagtccggccaatatggcgaaaccctgtctcttactaaaaaaaatacaaaaattagccaggtgtggtggcgggcacctggggaggctgaggcagggagaaatgcttgaaccggggaggcagaggttgcagtaagccaagatcgtgccactgcactccagagcaagactctttctcaaaaaaaaaaaaaaaagaattttgcatggggaaggagagatactgttcaccatctggaatggtgcttggatgtggcacttacaaaatcaggagccagcactgcatggacaaacagaagcatgtgggcctgagatagcaggtaccttgataaccctgaagacatccttggtttctgcatctattcctgcatccttgcattggactacattaatctgtcagttatccttataatgatttttgattttttttttttgagatggagtttcgctcttgttgcccaggctggagtgcaatggcacgatctcggctcaccacaacctccacctcccaggttcaagtgattctgctgcctcagcctcctgagtaactgggattacaggcatgcgccaccacacctggctaattttgtatttttagtagagacggggtttctccatgttggtcaggctggtctcgaactcccaacctcaggtgatcaccctgtctcggcctcccaaagtgctgggattacaggcgtaagccatggtacccggtctgttttttgattttttgaaaccagtctgaagtgagtttttttaattacgtgaaaggagtttggctaaaatactgccatactgccctaatgcctaatgattatgtattctcagcatgtctgcaaagtactgctgatttctggagaataatttttctttagtaaacttcacttaagtcgtcatgtgtattctctcaaaatggtatcctaacctaatggagctaaaagacaccccttgtttttataacaagcagttactgaggcccaggaaggggagaagtccctggcttgtgagatgatcaccattagaactcaggcctgggccagtgccttttcatgcttctcagatccttccaaagaataatgaagattataaccgcttttagcaattgtaataaacccagaaatagaaagctttttggttagagtactggtagaagtttggcgggagagataatttttacaaaatttgtaaatacctgccaattctatatactaggcaaggtctctggccttgtaaaacccctcaaggttacaactttggtggcccacactaatagttacccactgaggccctctccgggtgaacattgagcactagaggaagcccctctgcttgggcaggactgggcgtggtgcagagtaggagcggtgatactgtggattctgggcaggtggagatggccagtgatgtccaataaaggacactggagggagcagtgtgagtaaaggccctgagggcattcatgttcagggagggttgctgcccactggcttgcttggcacacaggagagtgggtattcctgccttagtaactttatgtaaacaagtatttcctcagtctgttcctctcaaactgcctgctctggcacattcagaatgtcacagaactcacctggatgcattcagccccttgcctaaaggtgacagtgcatctccttccccaccccacccctcataccactgaagcacctgtcagactggcccagtctgtgggcaaggagcctagagagggcttagtttcagcttgaaaggagctgggatttaccaagaagcaaatgagagacgaggattgcaacaactgtgccatttccccagcttcagctgactcctgtatattgactgtgccttcagactcatccgtaagtgaccccaggctggcctctcccacatcacagtaagaattccacacaccatacaacttggaaagaggctccagctgaaggaagccccacacttctttcaagtttttcttagtcttctcttcttggcaaagagtaccttttgtttcttctaattatgtaactattggtttagtaaatattcacccattcagtcaccctgtaagtggcaggcactgtttacagggacacaggaaggaataaaaacttgcaggcaccttggagcttgcattctattgaagaggtaatggaagttgggatagcagctaaactatgctggtattggccaggcgcagtggctcacacctgtaatcccagcactttggaggccaaggtgggcagatcatgaagtcaggagatcgagaccatcctggctaacatggtgaaaccccgtctctactaaaagtaaaaaaaaaaattagccaggtgtggtggcgggcgcctgtagtcccagctacttgggaggctgaggcaggagaatggtgtgaacccaggaggcgaagattgcagtgagccgagatggcaccactgcactccagcctgggtgacagagcgagactctgtctcagaaaaaaaaaatatgctggtagttttgattcaagatggcctttggagcccatgatttaggtctcgtacccaccaaggtctactggaaaacatcaggctctcctgctatagacccatagggagagctgcagccgagagggggagctgaagagaagtgccccttctgtgtcctgtcagcctcatccttccgcaaggaccagttgctgtgccactccattcacttgctgcaagactggaggtttttcctcaggtgttgagcacctggtttacaagatgtcagcatcttgatgcctgagaccatcaaggcaagtctctgaacagggcttaccttagagtaaggcttagaagaggccgtaaagtcagtctcagctccgtggctctgcagagctttgggacatgtgaattcttaaaaacaagactattgtacagttactatatgcatgcagtataaaattataaccttggaaaatcctagctagctgttgagctaattccataaagtaatcagctcctgagttctgcagtggtaataataatcagcataatgagtaaacactgtgtgtgccaggcagcgtctcatttgatccttgtgataatcttgtaagtactgattttctcccttctttaaacaaagttttttttttttttttagagagggtctcactatgttgcccaggctagtcttgaattc

SEQ ID NO: 14 - DNA, 162025 bp, Homo sapiens
  allele 129600: Nucleotide sequence of chromosome 17 containing the genomic sequence of the allelic variant AKAP10-7
gaattcctatttcaaaagaaacaaatgggccaagtatggtggctcatacctgtaatcccagcactttgggaggccgaggtgagtgggtcacttgaggtcaggagttccaggccagtctggccaacatggtgaaacactgtctctactaaaaatacaaaaattagccgggcgtggtggcgggcacctgtaatcccagctactcaggaggctgaggcaggagaattgcttgaacctgggagatggaggttgcagtgagccgagatcgcgccactgctctccagcctgggtggcagagtgagactctgtctcaaaaagaaacaaagaaataaatgaaacaattttgttcacatatatttcacaaatttgaaatgttaaaggtattatggtcactgatatcctgtttcattctttatataatcattaagtttgaaatgtatacttgcactactaacacagtagttaatcttagtcctacaagttactgcttttacacaatatattttcgtaatatgtatgcactggtgtttatgtacgtgtttatgtttatatctgttaaaattagcagtttccatctttttctattttgtaccatcacatcagttcagaaggattgacagagcaaaatgatttgatgaagtataaaagtcacatggtgagtggcataaatacaactctgaacaattaggaggctcactattgactggaactaaactgcaagccagaaagacacatatcctatatgtcaagagatgtaccacccaggcagttaaagaagggaagtacacatagaaagcacaatggtgaataattaaaaaattggaatttatcagacactggattcatttgctcctaaagtcagagtcctctattgtttttttgtttttgtgggtttctttttaaatttttttattttttgtagagtcggagtctcactgtgttacccgggctggtctagaactcctggcctcaaacaaacctcctgcctcagcttcccaaagcattgggattacagacatgagccactgagcccagcccagacgctttagcatttatgaagcttctgaaatagttgtagaaaccgcataagctttccatgtcactttcaaagtttgatggtctctttagtaaaccaaccaagttattcctcaagggcaaaataacatttctcagtgcaaaactgatgcacttcattaccaaaaggaaaagaccacaactatagaggcgtcattgaaagctgcactcttcagaggccaaaaaaaaaggtacaaacacatactaatggaacattctttagaagagccccaaagttaatgataaacattttcatcaaagagaaaagagaacaaggtgttagcaaattcctctatcaaataacactaaacatcaaggaacatcaatggcatgccatgtggaagaggaagtgctagctcatgtacaaaccagtagataatttcaacttgctgccgaatgaaacctctttgcaaggtatgaatcagcacttctcatgtttgttttgctttgttttgttttgtttttagagacaggcccttgctctgtcacacaggctggagtgcagtggcacgatcagagctcactgcaacctgaaactcctgggctcaagggatcctcctgccttagcctcccaagtagctgggactacaggcccaccatgcccagctaattttttaaattttctatagagatgggatctcactagcacctttcatgtttgatgttcatatacaacgaccaaggtacaatgtggaaaagggtctcagggatctaaagtgaaggaggaccagaaagaaaaggggttgctacatagagtagaagaagttgcacttcatgccagtctacaacactgctgttttcctcagagcagagttgatgatctaaatcaggggtccccaacccccagttcatagcctgttaggaaccgggccacacagcaggaggtgagcaataggcaagcgagcattaccacctgggcttcacctcccgtcagatcagtgatgtcattagattctcataggaccatgaaccctattgtgaactgagcatgcaagggatgtaggttttccgctctttatgagactctaatgccggaagatctgtcactgtcttccatcaccctgagatgggaacatctagttgcaggaaaacaacctcagggctcccattgattctatattacagtgagttgtatcattatttcattctatattacaatgtaataataatagaaataaaggcacaataggccaggcgtggtggctcacacctgtaatcccagcacttcgggaggccaaggcaggcggatcacgaggtcaggagatcgagaccatcctggctaaaacggtgaaaccccgtctactaaaaattcaaaaaaaaattagccgggtgtggtggtgggcacctgtagtcccagctactcgagaggctgaggcaggagaatggtgtgaacctgggaggcagagcttgaggtaagccgagatcacgccactgcactccagcctgggcgacagagcgatactctgtctcaaaaaaaaaaaaaaaaaaaaaagaaataaagtgaacaataaatgtaatgtggctgaatcattccaaaacaatccccccaccccagttcacggaaaaattctcccacaaaaccagtccctggtgccaaaaaggttggggaccgctaatctaaataatctaatcttcattcaatgctaaaaaatgaataaacttttttttaaatacacggtctcactttgttgcccaggctggagtacggtggcatgatcacagctcactgtagcctcaatcacccaggccccagcgatcctcccacctaaacttcctgagtagctgggactacaggcacgcaccaccatgcccagctaatttttaaattttttatagagatgggggtctcaccatgttgcccagactggtctcaaaccctgggctcaagtgatcctccctcaaactcctggactcaagtgatcctccttccttggcctcccaaagtgctgggattacaagcatgagccactgtacccagctggataaacattttaagtcgcactacagtcatggacaatcaggcttttcaacatgcagtatggacagtgagtcccagggtctgcttttccatactgaaatacatgtgatactaaggagaaaggtgctcgcaaggatatttaaaatgaagaatatttaaaatgaggaaaaaactgtttcttcatgactttgataaggctgataaagaccatttctgtgatctcaggtgattcactcaagtagtatatttcagtaatcattatctggaacagcctgaatcttaaccaaaataccatgattttttaatgctgttatgataccttgatgatatgaccaaactgcaatgtaggcagctaaatctccacgagtttgacttccccgagagttgacagttttcttcacaaattaaagaaatatattttttgatacatgattggcatatttaaaaactacactgaaatgctgcaaaatgatataaagaaacattttccagaatcaaatgcaatcaaagagtggattaggaatctactcaccattatcaactaaatagaaacacttggactgggtgtggtggctcacatctgtaatctcagcactttgggaggccaaggcaggtggattgcttgaggccaggagctcaagaccagcctgagcaacatagcaaaactctgtctctacaaaaaaaaaaaaaaattaaccaggcatggtggcagatgcttgtaatcccagctactctggaagctgaagtaggaggactgcttgagcccaggagatcaagactgcagtgagccgtggtcatgctgcgccacagcctgagtgacagagagagaccctgtctcaaaaacaaaaacaaacaaaaaacacttaaccttcctgttttttgctgttgttgttgttgtttgtttgttttgagatggagtctcactctgttgcccaggctggagtgcagtggcgtgatcttggctcactgcaagctctgcctcccgggttcacgccattctcctgcctcagcctcccgagtagctgggactataggcgcccgccaccacgcccggctacttttttgcatttttagtagagatggggtttcaccgtgttagccaggatggtcttgatctcctgacctcgtgatccacctgcctcggcctcccaaagtgctgggattacaggcatgagccaccgcacccggccaacctttctgttttttagtttgatatgcttgttaactcagcagctgaaagaatgctgaaagtggccttcagtaaaaaaatttcactagaatctctacatccatatttaatctgaatgcatatccagattgatcagttagagcaaaaacactcatcatcattcctgatgacctctaattctggtttcggctttctatttcaatggaaacagaataaggaaagaaatggaagggctctggaaatttgtcctgggctatagatactatcaaagatcaccaacaataagatctctcctataaatataaaacaagtataattaattttttaattatttttttctcttcagaggattttatttcaagataaaacataacttctacccatactattgattccaaaggttagaaaaagtgtttttcctcatcttatccttcaaagaggtcacagcaatgcaaacatctataaaatgcctctgcataattgtcagaagctatagtccagaaatcattgaaaatgcttttccattttaagcttaggtgaggtgtcttaggaaacctctatgacaacttactctatttattgggaggtaaactcccagactctcccagggtctcctgtattgatctcattttttaggcttcctaatcccttgaagcacaatcgaaaaagccctggatctcttttctgcacatatcatcgcggaattcattcggcttccagcaagctgacactccatgatacaagcggcctcgcccttctccggacgccagtccttgctgcggttagctaggatgaggggtttgctgggcttcagtgcaggcttctgcgggttcccaagccgcaccaggtggcctcacaggctggatgtcaccattgcacactgagctcctggcaggctgtaccaattttttaattatttaatatttatttttaaaattatggtgaatattttggtattctgctctaaaataggcccataaatgcacagcagatatctcttggaacccacagctttccactggaagaactaagtatttttcttttaaagatgctactaagtctctgaaaagtccagatcctctacctctttccatcccaaactaagacttggaatttatgagagatctagctaacagaaatcccagacacatcattggttcttcccagagtgcagtcctcctaaagaggctcagccctaagcaggcccctgcaccaggagggtgggtctgagacccacatagcacttcccaaggtgcatgctccagagaggcactgaaacagctgagcacaagcctgcaagcctggagaactctcacagtcagaacggagggggcccagtgggactaacataaagagaaaagggaacacagagaaatggatggcaccaacaaccagcaaagccttcatggccaatgaaagcatcagtgacggggccagaaccctcatccccaaagactcttcactgcctttagtgaaaaacaatggctagagagtgaagttatgatcatgtatagagaggtaaagttacatttttatattctgactctgctaatgtgaaattccctatctgctagactaaaagtttcagacaccctgttcaaatatcccattagttgctagagacttaaaatgaacagaacgcacattgtcaggatgactattaccaaaaaatcaaaagacagcaagtattggtgaggatgtagagaaactggaacttttgtgcactgtttatgagaatgtaaaatggagcagctgctgtggaaaagagtatgcaggttcctcaaagagtaaaaccaagatgtggaaacaactaaatgcccatcagtggatgaaggggtagacaatatgtggtatatacataccatggagtactattcagcctctaaaaaaaaaaaaggaaattctataacatgcaacagcatggatgaatcttgaggacattttgctaatgaaataaggcagtcatagaaagacaaatactgcacgactccacttatatgagataccaaaaatagacaaattcatagaatcaaagagtacaatggaggttacctggagctgcagggcgggaaacgaggagttactaatcaacgaacataacgttgcagttaagtaagatgaataagctctcaagatcagctgtacaacactgtacctagagtcaacaataatgtattgtacacttaaaaatttgttaagggtagattaacaaatgtagtagatccacaaatgtggttaagtgttcttaccacagtaaaataaaaaaagaatatcaagcccaggagttcgagactagcctgggtaacatggtgaaaccctgtctctacagaaaatacaaaaattagccagctgtggaggtgcactcctagggaggctgaggtgggaggcttgcttgagcccaggaggtcaaggctgcagtgagccatgattgcaccactgtactccagcccagatgacagagcaagacaccaccccccccaaaaaaagaaaaagaatatcaaacattttaaaagatcagatacgcaagaacaacaacaaaaaagagatgaacagagcatcgaccctcatctagtgggattcttggtctaactgaaaaacagacattgagagacaaacaatgacagtgatgtgatcacagcaattacacaggtatcccctggggactgcagaagaaaggaggaatgcctaactttcagaaaatagagaaagcgtcaaacagttggtgaaagccttccaaaactagagagaactgcacacaccaaatcacagaaagaagaaaagccgtgggagattctgggacccaccggctatttttgatggctgaacaccctgctgcaggagagacaggagctggaaagcatggtgggatgaaacctcaaacagctttgcctgcattgcttaagatgactgggcttgattaactctagtcaatggggacaattcaatcaaagaagaaagatgctcaaattcacattttagaatgattttttatggcagtatggggaatagattaaaagagagtgaagctggaggcaagaaacttgttaagaggcaactgaaacagtctagatgataaataataaactgacagagtgactagaaaaatcagaacaggctgaatcaacagatacctagatgaaaataacaggacttgatcaccagttgtatcttggagaggaaggagttgtttccttgctttccctacgactgggaatacggaaggtttgccgtgtgtattggttatatactggtgtgtagccaatcactgacaaccatttagcagcttaaaacacaaaggcttatctcccagtttctgtgggccaggaatctaagataggcttagctggctggttctggctcagagtttctcaagaggttgcaatcaagatgtcagctggggttgcatcatctgaaggctcaactggggccggagggtccacttccaaggagttcactcacctgcctgacaaggcagtgctggttgttggcaggagatctcaattcattgccaagtgagcctctctatagcattgctggaacatcctccccatctggcagttggcttctctcagcatgagtgatctgagagagagagcaaggaggaagccacagtgttcttcctactcctactcctaacactatggacctactcctaacactctcacttctgccttattccattagttagaaagggaactaagctccacctcttgaaataagaagtgtcaaagaatttgtggatatatttaaaaatcatcacactgtggaagtggatagggggttcaattaatgctgaacttgaaatgcctgagacattcaaatgtccaacaggcaatgaacatacccatagatggtcatgactttagcaagaatagaggaagatcacagaattaaggaggaattgaaaggtaaaagaagtggagtcagattccccctgaaaagtgagccatgaaaggaactttaactattgagttagaggtcagagtaggaaatttcggtggaattcttttttaaagaaaggaaccatataagcatgttttgaggtagagggagaataaatcagtagacagggagaggtaaaaaacataaatgataggggatagttgacaaaggtcttggcagaatcccttacccattgacttggggccaagagagggacacttctttgtttgagggataaggaaaataagaaagaatgggtgctatttagtgtggtcctgtctctagggcaaacgcataggtaacaaactgtgtgtgttaggaatatagatgtgacctcacattgagattctcacctcaaatccattttgttgttacctgtaccttcctaccttctctttttgctacatgcagactgctgttttgtcttcctggcctgttccaggtttcagcattctggcatatctgctaccctgttcccaaacctctctagagtccatgctccttccttggatagtgtttgattgggccacgtatctaagaagtgatgccttcagttaggcctgagaacctcctctatggaaatctccatcagtgaccctgacagacttggtatcttggagatgtcactgctcccagcctgtggtctaggagaatctcagcctgggcctctagtagtatggataaggcgttaaggtatctttgaaccagagtctgtcatattcctcaatgtgggacagataaaacagtggtagtgctggtgtttctgagctagaactctggtttttggtctagattctttgatgtatgacctttcagaggtattaaaatttgttctaatacaatgttcaatacaaatgtagttccttttctgttaggacctcaacaaaacatgaccaactgtagatgaacattaaactatgacaattcatggaaatgaatacagtaatacctgcggttcccccattttagcagtcactatggtgacatttggcacaaatggctatttaagggtgcttttgttaaaacctaccatcttactaggcacatgatattgaaactaatgaaataatggagaaacttcttaaaaacttttaatgaataaagtgatgaagtgataatattttagctgctatttataaagtgactattacaggtcaaacattcttctagggtttttttgttgaagttgtcacatttaatccttaataacccactatgagtcaggtattcttctctcccctttggacagttggggaaatgggggtcagagaggttaggtaatttgctcagggccacacaacctgcatgtagaaaatctgagatttgtacaggaacgtatcaaactctgaagtccatgcttctattttcccatgctgcctttctaataaaaggtaactaatgctactggatgctgcccccaaagtgagtcactttcaccccaccctacttgattttctccataaaactaatcacatcctgacaacttatttattgctgatctcccccactagattataaactcaataaaagcaagatccttgtctgctgaatatcagtacctaaaacgctgtctagcacagagcaagtaattaatatttgttgaatgaacaaataaaggaaaaaaattcaaaggaagaaaaagccctaaaacagatgtttacctaaacatacattttaaaagaaagcatataacaaattcaggacagaatttaaatttgattttttaaagaaataaccaagtgctagctgggcacagtggctcacacctgtaatcctagcactctgggaggccgaggcaggcagatcacttgaggtcaagagttcaagaccagcctggccaacatggtgaaacctgtctctactaaaaatacagaaattatccaggcatggtggcaggtccctgtaaccccagctactcaggaggctgagtcaggagaattgcttgaacccaggaggcagaggttgcagtgggccaagattgcaccactgcactccagcctgagtaacaaagcaagactctgtctgaaggagaaggaaagaaagaaggaaagaaggaaagaaggaaagaaggaaagaaggaaagaaagaaagaaagaaagaaagaaagaaagaaagaaagaaagaaagaaagaaagaaagaaagaaagaaaaagaaagaaagaaagaaagaaccaagtgcttatttgggacctactatgctatgtttttccatgcacgctattttcagtaaagcagttagcaaacttgcaagatcataacaacaaatatatgcttctataactctaaaattgtgctttaagaagttcctctttaccagctcatgtatgcattagttttctaagagttactagtaactttttccctggagaatatccacagccagtttatttaaccaaaggaggatgcttactaacatgaagttatcaaatgtgagcctaagttgggccagttcatgttaatatactccagaacaaaaaccatcctactgtcctctgacaattttacctgaaaattcattttccacattaccaaggagccagggtaggagaatatagaaagaccacccaagaatccttacttctttcagcaaaatcaattcaaagtaggtaactaaacacatgccctaacaatgaatagcagattgtgctcagaagaatgatctacaacatcttactgtgaaggaactactgaaatattccaataagacttctctccaaaatgattttattgaatttgcattttaaaaaatattttaagcctaaattttaaaaggtttgatattggtacatgaatagacaaacagacatggactagaccaagaattaggttcaaacatatacaggaatttaatatacgataaatctagtattccaaaggaaccaacaaatggtgttcagacagcaggataggcatcaggaaaaacacagttgggcaccctaccttactcctaacaccaggagtaactgaaggagcaccaaatatttatttattttaattatagttttaagttctagggtacgtgtgcacaacatgcaggtttattacataggtatacatgtgccatgttggtgaggagcaccaaatatttaaaagaaaaaaattggccaggggcggtggctcacacctgtaatcccagcactttgggaggccaaggtgggcagatcacctgaggtcgggagttcgagaccagcctgagcaacatggagaaaccccatctctactaaaaatacaaaattagccaggcatggtggcacatgcctgtaatcccagctacttgggaggctgaggcaggagaatagctttaatctgggaggcacaggttgcggtgagctgagatattgcactccagcctgggcaacaagagcaaaacttcaactcaaaaaaattaataaataaataaaaataaagaaagaaaagaaaaaaatgaaaatagtataattagcagaagaaaacaccgtagaatcctcggactcttaggatggggaatgcctataatataaaaaccctgaagttataaaagagaaaatcacctacatacaaaccaaatctttctacatgcctaaaacatagcacaaacacagctaaataatcatagctgaatgaactgggaaaacaaaacttgactcatatccagacagagttaattttcctacacataaagagtacctatataaacccaacaaaaaaaccaccactaacccaaaataaaaatgtgacaggtaatgaacaggtagttcacagagaatacaaatggctcttcggcacataagatgctcagactgacttttacttatttattttttgagagacagggtctcacgatgttgcccaggttaggctcaaactcctgggctcaaatgatagtaccaggactacaggtgtgccccaccgcacctggctcctcaaccacctgtattaacaggaaatgcaaaataaaactttcaaatctattttacctattagaatggcaaaaatttgaaaaacttcaaacatcatcatgttggtgagaatgtgaggagactggcactctcattttttgctgatagcatatatatactgatggcttctatggaaagcaatctggcagcgtctatcaaatgtacaagtgcatatatcctttgacaaagcaattccactctaggaatgtgttctatatggttgtgcttcctggggctgggaactgggagctaagggacaggggcagaagataatcttcttttccctccttccccgttaaacatgttgaattttatatactgtaatatattatttttcacaaaagataatttttaagcgatatgtctgggaatttttttttttcttttctgagacagggtctcactctgtcatccaggctggaatgccatggtatgatctcagctgactgcagcctcgacctcctgggttcaagcaatcctcccacctcagcctcctgagtagctgggactacaggcacgtgccatcatgctaatttttgtatatacagggtctcactatgttgcccaggctaatgtcaaactcctaggctcaagcaatccacccacctcaggctccaaagtgctgggattacaggcgtgagccaccgcgcctggccctgggaattcttacaaaagaaaaaatatctactctccccttctattaaagtcaaaacagagaaggaaattcaacctataatgaaagtagagaagggcctcaaccctgagcaacaaacacaaaggctatttctgagacaggaatttgctgaacaaaatcgagggaagatgacaagaatcaagactcacttctcggctgggcgcagtggctcacacctgtaatcccagcactttgggaggccgaggcggacagatcacgaggtcaggagattgagaccatactggctaacacagtgaaacccagtctctactaaaaatacaaaaaattagccgggcgtggtggcaggtgcctgtagtcccagctacttgggaagctgaggcaggagaatggcgtgaacccaggaagcggagcttgcagtgagccgagatcacgccactgcactccagcctgggtgacagagcaagactctgtctcaaaaaaaaaaaaaaagactcatttctctagatcttgagccgtattcaaatttatctcagcttagtgagaggttaaagcaaggaatatccttccctgtgggccctgctccttactgaaggaaggtaacggatgagtcaaggacaccaatggagaaaagcactaacaccattatctgatgaacattacgtgaagaagggtaagaagtgaagtggaattgctgaagaagtcagtgaaagcggacattcatttggggaaatggaatataggaaatccataaaagtgattaaaaagatgttagaggctgaggcggggggaccacagggtcaggagatcgagaccatcctggctaacacggtgaaaccccatctctactaaaaatacaaaaaattagccaggcgtggtggcaggcacctgtagtcccaactactcgggagactgaggcaggagaatggcatgaacctgggagacggagcttgcagtgagccgagatcacgccactgcactccagcctgggtgacagagtgagactccatctcaaaaaaaaaagttagatacgagagataaagatccaacagacacacaactgctaattctgaacagaacaaaacaaatggcacaggaaaagaaaatttaagatataacaccggaaaactttcctgaaattgagtaactgaatctatagcttgaaagggtttagcatatgccaagaaaaatcagtagagtccaaccagcacaagacacatctagcaaggctggtgattctaccaacacagagaaagaagtgggtgacccataatgcggaaaaaggcagaccatctgcagtcttctccagaacactggagtctgaagacaaaagaatgctgcctactgagccagaagggagagaaagtgacccaacacatctttaccaagttagaatgtcacgcattatttaaaggctgcaaaagccatgaaagacatgaaagaacacaagcatttacaacatgaaagaacacaagcattctcatactcaagaatccttaagaaaaatgtagtcctaatccagcccactgaaagttaaatgtacttaatgtgctcattaatgggaacttcatagcttcaaatcagtctggtcccatctaccaacatctctcgcccggctttcctgcaatagtcagcacctttccctcctcccagtcttgtcccctggagtctgctctcagcatagcagagtgaccacatcaacacccaagtcagagccctccagtgcgcactggtctacaaagcccttcccaccccccaccccacgtgccctccggatccttgtgacgtgtctcctgcataccctagcagccctggcctcctcactgcccctcctgtacatcaggaaggcgactccttgagtcttggctctggccgcctcctccacctgcagtgagttaactcccttacctactctaggtcattgctcaaatgtcagcatctcaatggggccctccctgactaccctatttaaattctacatactccccttgaccccatggacctcactcaccctattccacttttattcttacaatttagcacttgttctcttctaacgtattctaagacttactcatttattacattgtttgccaccccctctagtacataaactccagaggggcagggatttctgtctatttattcatttctttatccctaggacatagaacagggcatagttcagagtattcaatgttatcaatgaatgaactagcagtagtaccagttccagttaggcacagaattaaatctaaatagaattaaatctcatggtctgggttaactatggatagaaaattagatataattttaagaagcctagaaagaaaaaattaataatgtaaaaataatattaatttgataataataacaaaaactctgccaggcactgtggctcaaatctgcaatcccagctactcaggaggctgaggtggaaggatcacttgagaccagagttcaagactcagcctaggcaacacggcaagaaactgtctctaaaaaaattaaaacttaaatttttaaaaaagaattctcaaagcgtcacaaaaactggagattaaggtacaggaagtgtgaagtaatattactatgctaatggttttttttttttttagaaaggtataaccaaaagatttctttctcaagtcgataaactgagaaagataagcatatcttccaattaacagagggggaggaaaagccagatacaacaaaataagatataaattagtttccagttgaaaacaagagtaggagttattttgcatcacctcacctgtgacctcccccagcccaaaaaacactactgataaacagggtagaaaagcatcatctcagataaagcaggaaaaactgccacagtctcaaaccacaaactataagcacacacctggccaaccctgccaagtctgggctcagtaggaggaacgtgctgagagctaggatgtaccaacttagacattctgtgggatacagatgtccctggaagggtcacaccatctcaaaggcacctgtaatgcccactgattacagccaccatatgtgagagagaaactcagggcacttagagagtataacaagaaccttatgtcatctgagatgaggaatcctcagccctgcaaattaaccaactctttagaacaactggcaaaacataaatatccacaacttttgtttcagtaattccactcttagatatcaatccaaagtacatgagacagcagatacacacacaaaatggtatttactgcagcattgtttataatagcaaaaaacaagaaataatccatatgtctcaataggatactgggtacatgagggtatgtacccatcattcaaccatcaaaaagagtgatatggatgtccacagatggacataaaaagctgtgtgttacgtgaaaacaaactcaagcagcagcaggatgggcttatgatagtcagtatgagctaatttctggaaaaaaaaatctagtgtgtgcacagaaaacatctgaaagaacagaaacaaaactatcagcagaatattgagatgttttactaagttgtatatctatactgcttgtaatttttaccccaagcaagaattactttttggaaaaagaaaattcaggaaataaagcatttctttaaacttcatgtttaaacaaatggtgatggaataaaagagttcttattcatcataaacacacacagcacacatgcacgcatgtgcgtgagcacaccctttacttgataaataccatgttgaatattttagtctttccttttaggttctatcccttcactcaaaatgcggttataaataaatgtacttttcatgtgccttctgcctaaacccactttaatataactttacagtcccattatcattatagtctcaaagctagactcagcctgaaactaccctttcatttggaacccttattaaaatgccacatacagctccttcaaataaaaacaaaccctaggacctgacactaggcttcctttgttgctactcataatggccaagttctgtgcttataatacatcttctttcattttattgctacatatccaagggttttatatgtttttcttattatatcttaattcaaaacaccatcacgctcttttccagatgaaaataaggaaaagaaattgagcaactgactgacttaaaggtcataaaactatatagtagcagagtcagcaaaagaagaaacacacatctcccaagtagaggctgaaaaccagtaccattcacctccagggtgagctatatacagattacaaagtcaccttctctaaatgttcaaactgaatcccatacccatactttaccactacctcgtaagaacagcctcagatcttgttatagccttttttttagcatgctgaagccaataaaatgcttcccattcagcaagagaaacaagttctgaaacactgaataatctgcccagggcctatgaacatttccactgtgagaaatgttctccactgtgtggagaagatccttactcttctccacacaggcagaacattagaaaaattcttggattctatgatgcacagcttaggagtctgtttagcacaatttaagtccaaatagttattaaatcctcctctgttccagaaacagtgctaaatactgtgaatataaaaattgaaaagatactctcctggctcccaagaaagtcagccagatagaggagacacaggcacacaaatcactgtcacatgaagctctacctccctaacttcaaacgagggcctaagtcaccaagaatacagtagcagttgtgactacgagtaactactataattcaatactttatcttcccttagaaaactcttctcccttggaaatttatttgcatttctaaataccattccttactaaaaggaagcagggctccttggggaaatagctgattctaggtgtggactatgaaatgaaaatggtgagtctgggacatcccatgttgcccagaaatcaaggaactgcccaaagattaacagagtcatgttaaatggacctaagagtgaaccagaaggagctcactttgccccgcgtggaacaatttcaagaaaaacatgacagtaatgaattataaaacatgaattaaaatacatattggtactaaaaagagaacaaaaggatgtggctttggataaagctcttcttcatggaagaataccagctaataaatgtaaaggaaatgagagaattagaaaaattatcattttgtaaaccttaatatattcacctagacatgctaaaaccactgagtaaaaggctgcttgggaagaggatgctcacatgatctcagagtttcacaccacagataatttattagatacaggaaggaagatgtgatcaagcttcctgtgacccccagccaggccccacaacactatgtgcctccttgtgatgtgggagctacacagcatcgcccacacagcttctcgccaaaactgtttgaagctaatcacaagggaagaactggacagcttctgaccatgagacgctccaccagacaacttgcttggcctctccaaagaaacttgcttggcctctccaaagaaaactcagtttcatttaaaaacaaaactaattatttaaaaacaaacgaaaagcaagttgtggacttgagctccagggacagagcagacatacttttccctgttcttcccagtaagtggtaataaaaaccctcaacactagatataaaacaaatataagaaggttctggaaggggaagaggaggcagactatccaggtgccttgaggcccacagaacaacccagtgatgggttcactgggtcttctttttgcttcattatctcagacttggagctgaagcagcaggcaacttcaaaacaccaaggggcacagattgaaaagccccaagaaaagcctgccctctctagccaaaggaccaggaaggagacagtctaatgagatggaacacatttagacagtaactgcccatttaccagcaataactgagcagggagcctagacttccagtcttgtgaggacgtaccaaggtacccaacacccccaccaaggctgagtaaggactgcgacttttatccctgcatggcagtagtaaggagcccatccctcacccgccagcagtgtcaggggaacctggacttccactcccacccaggagtgatgaggccctccctgctggggtcatgtcagaggaggcctagtggagattcagtgacttaaccttttcccagagataatgaggccacctttcctccctcttcccccatggtgacagtgaaagcactgtggcaagcagtaggcactcctacccctcctagccagggaggtatcagggaggccaagtagggaaccagaatacccacaaccacccagcagcaacaggggtcccccaccccattgggtgtcaatggaagcagagcggaaagcctggatatttacccccatctagaagtaacaagctgatgtcccccttcttctactacaatggtgttcaaaacaggtttaaataaggtctagagtctgataacgtaatacccaaatcgttgaagttttcattgaggatcatttataccaagagtcaggaagatcccaaactgaaagagagaaaagacaattgacagacactagcactaagagagcacagatattagaactacctgaaaggatgttaaagcacatatcataagcctcaacaggctgggcgcggtggctcacgcctgtaaccccagcactttgggaggccgaggcaggtggatcacaagatcaggagatcgagaccatcctggctaacacggtgaaaccccgtctctactaaaaatacaaaaaaaaatagcaaggcatggtggtgggcacctgtagtcccagctactcgggagcctgaggcaggagaatggcatgaacctgggaagaggagcagtgagccgagatcgcaccaccgcactccagcctgggcaacagagcaagacttcgtcccaaaaaaaaaaaaaaaaaaaaaaaaagcctcaacaaacaactacaaacgtgcttgaaacaaatgaaaaaaaaatcttggcaaagaaataaaagatatatattttggccaggtgcagtggctcacagcctgtaatccctgcactttgggaggctgaggcaggcggatcacctgaggtcaggagtttgagaccagcctgaccaacatggagaaaccccgtctctactaaaaatacaaaattagccagtcatggtggcacatgcctgtaatcctagctactcaggaggccgaggcaggagaatcgcttgaactcaggaggtggaggttgcggtgagccgagatcccgccattgcacattgcactccagcctgggcaacaagagcaaaactccatctcaaaaaaatagatacatattttaatggaaattttagaattgaaaaatacagtaaccaaattgaatggaaagacaacatagaatggagggggcagacaaaataatcagtgaacttcaacagaaaataatagaaattacccaatatgaagaacagaaagaaaatagactggccaaaaaataaagaagaaaaaagaggagcagcaggaggaatgatggaaaaagagaaaggaaggaaggaagggaaggagggagggaaggagtgagggagaaagtctcaaagacctctgagactaaaataaaagatctaacacttgtcatcagggtccaggaaagagacaaagatggcacagctggaaacgtattcaaaaaataatagctgaaaacttcccaaatttggcaagagacataaacctatagattcgaaatgctgaaccccaaataaaaagcccaataaaatccacaccaaaatacatcatagtcaaacttctgaaaagacgaaaagagaaaacgtcttgaaagcagtgagtgaaacaacacttcatgtataagggaaaaacaattcaagtaacagatttcttacagaaattaaggaagccagaaggaaatgacacaatggttttcaagtgctgaaagaaaagaagtgtcaacacaaaattctagattcagtaaaaatatccttcaagaatcaatgggaaatcaagacagtctcagataaagcaaaataagagaatatgttgccagcagatctcccctaaaggaatggcaaaaggaagatcatgcaacagaccaaaaaatgatgaaagaaggaatccagaaacatcaagaagaaagaaataacatagtaagcaaaaatacatgtaattacaataaaatttctatctcctcttaagacttctaaattatattgatggttgaagcaaaaattataaccctgtctgaagtgcttctactaaatgtatgcagagaattataaatggggaaagtataggtttctatacctcattgaagtggtaaaatgacaacactgtgaaaagttacatacacacacacacgtaagtatatataaatatatgtgtgtatatgtgtgtgtatatatatatatacatataatgtaatacagcaaccactaacaacactatacaaagagataataaccaaaaacaatttagataaattgaaatggaattctaaaaaatattcaaatactctacaggaagacaagacaaaaagagaaaaaaagaggaggacaaactaaattttttaaaaacataaataaaatggtagacttaagccctaacttatcaataattacataaatgtaaatgatctaattatatcaattaaaagacagagatagcagagttaatttaaaaacatagctataagaaacctgctttgggctgagtgcagtgactcacacttgtaatcccagcacttcgggaggccaaggcgggtggatcacctgaggtcaggagttccagaccagcctggacaacatggtaataccccatctctactaaaaatacaaaaaaattagccaggcatggtggcacacgcctgtagtcccaactactcaggaggctgcgacacaagaactgcttgaacccgggcagcagaggtagcagtgggccaagattgcgccactccagcctgaacgacagagtgagactccacctcagttgaaaaacaaaaaagaaacctgctttaaatataccaacatatgttggttgaaattaaaagaataaaatatatcatgaaaacattaatcaaaagaaaggagtggctatattaataacataaaatagacttcagagaaaagaaaatttcaagagacaggaataaaaggatcaagaaaagatcctgaaagaaaagcaggcaaatcaatcattctgcttggagattcaacaccctctcttaacaactgatagaacaactagacaaaaaaatcagcatggagttgagaagaacttaacaccactgaacaacaggatctaatagacatttacggaacactctacccaacaatagcaaaataaacattcttttcaagtattcactgaacatatccttagaccctaccctgggccataaaacaaagctcactagtgattgccgaaggcttggatggacagtggaagagctgcatggggagggagaaggtgacagttaaagagtgtaggatttctttttgggataatgaaaatgttccaaaattgattgtggtgatgttggcgcaactctacaaatataaaaaaggccattgaattgtacgttttaagtgggtgaaacatatggtatgtggattatatctaacgctttttaaaaacttaacacatttcaaagaatagaagtcatacagagtgtgctctactggaatcaaactagaaagaggtaactggaggataacgagaaaagcctccaaatacttgaaaactggacagcacatttctaaaatcatccgtgggtcaaagatattcatttctgatattcatttttattgtttaatgtatttttaaaaatttcttaagggaaataaactgactaaaaatgaatatggctgggtgcggtggctcacgcctgtgatcccagcactttgggaggccgaggctggtggatcacaagatcaggagttcgagaccagcctggccaagatggtgaaaccccgtctcaactaaaaaactacaaaaagtagccaagcgcagtggcgggagcctgtggtcccagctacttgggaggctgaggtaggagaatcgcttgaacacaggcagcagaggttgcagtgagccaagattgtgccactgcacgccagcctgggcgacagagactgcctcaaaaaaaaaaaaaaaaaaaagaatatcaaaatttgtgggacatagttaaagcaatgctgagagggaaatttataacactaaatgtttacattagaaaagagaaaaagtttcaaatcaatagtctccactcccatctcaagaacacagaagatgaagagcaaaataaacccaaagcaagcaaaagaaagaaaatataaaaataaatcagtaaaattgaaaacagaaacacaataaagaaaatcagtgaaacaaagtactgattcttcgaaagattaataaaattgacaaacctctagcaaggctaacaaacaaaaaagaaagaagacacggattaccagttattagaatgaaagcataattagaaacaactctacacattataaatttgacaatgtagatgaaatggactaattactgaaaaaacacaaattaccacaactcacccaatatgaaatagataattgggatagcctgataactactgagaaaattgaatttgtaattttaacactcttaaaacagaaacattaaacttaatattttataaatattagataaggtaattatacccttccttaacaaataaaaacgacaaattattttgcagctaaagagatgtatgtactgtgaaaaatatcttcagaaaaatagaactttgtttgaagaataaggatttaaaaaatgtttttaactctcaagaagcaaatatctgggcccagatggtttcactgaagaattctaccaaatgtttaatgaagaattaccaccaactctacatagcatctttgagaaaactgaagagaagggaacatctcccagttcattttatgaagtgggtgttactctgatactagaactgtataaggacagctactcttgacacactgcctatgggtagctctgctctgcaggaacagtcagaaaaaaaaaaaaaagaagcactggacaagggcagtataaaaaaagaaaactgggccaggtgcagtggctcacacctgtaatctcagcactttgggaggctgacgctggtggatcacctgaggtcaggagtttgagactagcctggccaacatggtaaaaccctgtctctactaaaatacaaaaattagccaggcagggtggtggggaaaataaaaaggaaaaaaaaacaaaaataaactgcagaccaatatccttcatgagtatagacacaaaactccttaaactccttaacaaaatattagcaagtagaagcaatatataaaaataattatacaccatgatcaagtgggacttattccagaaacgcaagtctggttcaacatttgaaaacaaggtaacccactatatgaacgtactaaagaggaaaactacataatcacatcaatcaatgcagaaaaaagcatttgccaaaatccaatatccattcatgatactctaataagaaaaataagaataaaggggaaattccttgacttgataaagcttacaaaagactacaaaagcttacagctaacctatacttaatggtgaaaaactaaatgctttcccctacgatcaggaacaaagcaaggatgttcactctcattgctcttatttaacatagccctgaagttctaacttgtgcaaaacgataagaaagggaaatgaaagacctgcagattggcaaagaagaaataaaactgttcctgtttgcagatgacatgattgtctcatagaaaatgtaaagcaactaggggtaggggggcagtggagacacgctggtcaaaggataccaaatttcagttaggaggagtaagttcaagatacctattgcacaacatggtaactatacttaatatattgtattcttgaaaatactaaaagagtgggtgttaagcgttctcaccacaaaaatgataactatgtgaagtaatgcatacgttaattagcacaacgtatattactccaaaacatcatgttgtacatgataaatacacacaattttatctgtcagtttaaaaacacatgattttggccaggcacagtggctcatacctgtaatcccagcattttaggaggctgaggcgagcagaaaacttgaggtcgggagtttgagaccagaatggtcaacatagtgaaatcccgtctccactaataatacaaaaattagcaggatgtggtggcgtgcacctgtagacccagctacttgggaggctgaggcacgagaattgcttgaacaagggaggcagaggttgcagtgagctgggtgccactgcattccagcctggtgacagagtgagactccatctcaaaaaaaataaaataaagcatgacttttcttaaatgcaaagcagccaagcgcagtggctcatgcctgtaatcccaccactttgggaggccgaggcaggcagatcacaaggtcaggagtttgagaccagcctgaccaacatggtgaaaccccatctctactaaaaaatatataaattagccaggcatgtgtagtctcagctactcaggaggctgaggcaggagaatcacttgaacccggaggcagaggttgcagtgttgagccaccgcactccagcctgggtgagagaacgagactccgtctcaaaaaaaaaaagcaaaataacctaattttaaaaacactaaaactactaagtgaattcagtaagtctttaggattcaggatatatgatgaacatacaaaaatcaattgagctggacaaaggaggattgttttaggtcagtagtttgaggctgtaatgcacaatgattgtgcctgtgaatagctgctgtgctccagcctgagcagcataatgagaccacatctctatttaaaaaaaaaaaaattgtatctctatgtactagcaataagcacatgggtactaaaattaaaaacataataaatactgtttttaattgcctgaaaaaaatgaaatacttacatataaatctaacaaaatgtgcaggacttgtgtgctgaaaactacaaaacgctgataaaagaaatcaaagaagacttaaatagcgtgaaatataccatgcttataggttggaaaacttaatatagtaaagatgccaattttatccaaattattacacaggataacattattactaccaaaatcccagaaaaattttacatagatatagacaagatcatacaaaaatgtatacggaaatatgcaaaggaactagagtagctaaaacaaatttgaaaaagaaaaataaagtgggaagaatcagtctatccagtttcaagacttacatagctacagtaatcaagactgtgatattgacagagggacagctatagatcaatgcaaccaaatagagaactaagaaagaagcacacacaaatatgcccaaatgatttctgacaaaggtgttaaaacacttcaacgggggaagatatgtctctcattaaagggtgtagagtcattgcacatctataggcaaaaagatgaacctgaacctcacaccctacagaaaaattaactcaaaatgactcaaggactaaacataagatatacatctataaaacatttagaaaaaggccacgcacggtggctcacgctcgtaatcccagcactttgggaggccaaggcaggtggatcacctaaggtcaggagtttgagaccagccggatcaacatggagaagccccatctctactaaaaatacaaaattagctggacgtggtggcacatgcctgtaatcccagctacttgggaggctgaggcatgagaatcgcttgaacccggggggcagaggttgcggtgagccaagatcacaccattgcactccagcctgggcaacaagagcaaaactccaactcaaaaaaaaaaaaaaaaaggaaaaatagaaaatctttgggatgtaaggcgaggtaaagaattcttacacttgatgccaaactaagatctataaggccagtcgtggtggctcatgcctgtaattccagcactttggtcaactagatgaaaggtatatgggaattcactgtattattctttcaacttttctgtaggtttgacatttttttagtaaaaaattgggggaaagacctgacgcagtggctcacacctgtaatcccagcactttgggaggccggggcaggtggatcacacggtcaggagttcgagaccagcctggccaacatggtgaaaccccgtctctaccaaaaatataaaaaattagccgggtgtcatggtgcatgcctgtaatcccagctactgaggaggctgaggcaggagaatcacttgaacctgggaggtggaagttgcagtgagccgagattgtgccactgcactccagccttgggtgacagagcgagactccgtctcaaaagaaaaaaaaaaaaaagaatatcaaacgcttactttagaaactatttaaaggagccagaatttaattgtattagtatttagagcaatttttatgctccatggcattgttaaatagagcaaccagctaacaattagtggagttcaacagctgttaaatttgctaactgtttaggaagagagccctatcaatatcactgtcatttgaggctgacaataagcacacccaaagctgtacctccttgaggagcaacataaggggtttaaccctgttagggtgttaatggtttggatatggtttgtttggccccaccgagtctcatgttgaaatttgttccccagtactggaggtggggccttattggaaggtgtctgagtcatgggggtggcatatccctcctgaatggtttggtgccattcttgcaggaatgagtgagttcttactcttagttcccacaacaactggttattaaaaacagcctggcactttcccccatctctcgcttcctctctcaccatgtgatctcactggttccccttccctttatgcaatgagtggaagcagcctgaagccctcgccagaagcagatagtgatgccatgcttcttgtacagcctacaaaaccatgagcccaataaaccttttttctttataaattatccagcctcaggtattcctttatagcaagacaaatgaaccaagacagggggaaatcaacttcattaaaataatctatgcagtcactaaacaaataagaacaagaggctccagaagtgggaagccaatacccagagttcctacaatacagtatctgaaaagtccagtttccaaccaaaaaatatatatatacaggccggacatggtagcttatgtctgtaatcccagcactttgggatgctgaggcgggcagatcaccctaggtcaggagttcgagaccagcctggccaatatggcaaaaccccgtctctactaaaaatacaaaaattagccaggcatggtggtggatgcctgtaatcccagctactcgggaggctgaggcagggaatcacttgaacccaggaggcagaggttgcagtgagccgagatcacgccactgaactccagcctgggcaacaaagtgagactccacctcaaaaaaaaaaaaaatatacatatatatatgtgtgtgtgtgtgtgtgcgcgcgtgtgtgtatatacacatacacatatatacatatatacagacacacatatatatatgaagcatgaaaagaaacaaggaagtatgaaccatactttctgtggttatgataggatggggtatcacgggggaagtagacaagggaaactgcaagtgagagcaaacagttatcagatttaacagaaaaagactttggagtaaccattataaatatgtccacagaattaaagaaaagcgtgattaaaaaaggaaaggaaagtatcataacaatattactccaaatagagaatatcaataaaggcatagaaattataaaatataatacaatggaaattccggagttgaaaggtagaataactaaaatttaaaattcactagagaaggttcaacactatatttgaactggcagaagaaaaatttagtgagacaaatatacttcaatagacattattcaaatgaaaaataaaaagaaaaaagaatgaagaaaaataaacagaatctcagcaaaatgtggcacaccattaatcacattaacatatgcatactgagagtaccggaagcagatgagaaagaggaagaaaaaatattcaaatgatggccagtaacttcctagatttttgttttaaagcaataacctatacaatcaagaaactcaatgaattccaagtaggataaatacaaaaagaaccacaaacagatacaccatggtaaaaatgctgtaagtcaaaaacagagaaaatattgaaagcagctagaggaaaacttataagagaacctcacttacaaaagaacatcacttataaaagaaccacaataatagaaacagttgacctctcatcagaaacaatgaatgataacatatttgaagtgctcaaagaaaaaaaataaagattcctatatacgacaaagctgtctttcaaaaatatacatccaaaaggattgaaaccagggtcttgaagagttatttgtacatccatgttcatagcagcattattcacaatagccaaaaggtagaagcaacccaagggtccatcgacaaataaataaaatgtggtatatgtatacacaatggaatttattcagtattaaaaaggaatgaaattctgacacatgctacaacatggctaaaccttgagaacactatgctaagtgaaataagccagccacaaaaggacaaataccatattacttcacttgtatgaaatacctagggtagtcaaattcagagatagaaagtaaaacagtggttgccaagggctgagggagggagtaacgtggagttattgttgaatgggtacagaatttcagttttgcaagataaaaagagttctggagacagatggtggtgagggtggtacaacaatacaaatatactttatactactgaacagtatacttaaaaatgattaacatggtgaaaccccgtctctactaaaaatacaaaaaaattagctgggtgtggtggcgggcacctgtaatcccagctacttgggaggctgaggcagcagaattgcttgaaaccagaaggcggaggttgcagtgagctgagattgcgccaccgcactctagcctgggcaataagagcaaaactccgtctcaaaaaataaaaaataaaaaaaatttaaaaatgattaagcaggaggccaggcacggtggctcacacctataatgccagcactttgggaggccgaggcaggcgatcacttgagaccaggagtttgagaccagcctggccaacatggcaaaaccctgtctctgctaaaaatacaaaaattagccaggcatggtggcatatacttataatcccagctactggtgagactgagacacgagaattgcttgaacccaggaggcagagattgcagtgagtcgagatcgcgccactgaattccagcctgggcgacagagcaagattctgtctcgaaaaaacaaaaacaaaaacaaaaagcaaaaccaaaaaataattaagcaggaaacgagattgctgctgaggaggagaaagatgtgcaggaccaaggctcatgagagcacaaaacttttcaaaaaatgtttaatgattaaaatggtaaattttatatgtatcttaccacaaaaaaaagggctggggggcaggaaatgaaggtgaaataaagacatcccagagaaacaaaagtagagaatttgttgccttagaagaaacaccacaggaagttcttcaggctgaaaacaagtgaccccagagggtaatctgaattctcacagaaaattgaagcatagcagtaaaggttattctgtaactatgacactaacaatgcatattttttcctttcttctctgaaatgatttaaaaagcaattgcataaaatattatatataaagcctattgttgaacctataacatatatagaaatatacttgtaatatatttgcaaataactgcacaaaagagagttggaacaaagctgttactaggctaaagaaattactacagatagtaaagtaatataacagggaacttaaaaataaaattttaaaaaatttaaaaataataattacaacaataatatggttgggtttgtaatattaatagacataatacaaaaataccacaaaaagggaagaagacaatagaactacataggaataacattttggtatctaactagaattaaattataaatatgaagtatattctggtaagttaagacacacatgttaaaccctagatactaaaaagtaactcacataaatacagtaaaaaaataaataaaataattaaaatgtttgtattagtttcctcagggtacagtaacaaactaccacaaattgagtggcttaacacaacttaaatgtattttctcccagttctggaggctaaacacctgcaatcaaggtgagtacagggccatgctccctgtgaaggctctaggaaagaatcctcccttgtctcttccagcttccagtggttctcagtaaccctaagtgctccttggcttgtagctatatcattcctagcaaccagaaagaagaaaataataaagattatggcaaaaaataatgaaatcaaaaggagaaaaatggaaaaaaataaataaaaccaaaagctagttctttgaaaagatcaaccaagttaacaaaccttttaactagactgacaaaaaggaggtaagactcaaattactagaatcagaaataaaagaggggacattactaatgagggattagaaaagaatactacgaacaaatgtgtgccaacaaattagaaaacttagatgaaatggacaggttcctaggacaacatcaactaccaaaatttactcaagaagaaagagacaatttgaatgagctataacaagggaagagactgaattgacaaccaagaaactatccacaaagaaaatcccaggcccagaagatttcactgtgaaattctttcaaacttataaatataaattaacatcagttcttcacaaactcctccaaaaaaaagaacagatctctatttacaggcgatacgatctttagaaaatcctaagggaactactaagacactatgataactgataaacaagttcagcaaggctgcaggatagaaaaccaatatacaaaaatctattatatttctatacacttgcagtgaacaacccaaaaatgagattaagaaaataattcaatttacaataacatcaaaaagaataaaaacactcaaaaataaatttattcaagtaagtgcaaaacttatactctagaagctacaaaacactgttaaaagaaattaaaggtttacataaatgaaaaactatcccatgttcatggatcaaaagacttattactggcaatgctctccaaattgatctataaattcaacaaaatccttatcaaaatcccagatgaggctgggggtggcggttcatgcctgtaatcccagcactttgggaggctgaggcacgcagattacctgaggtcgggagctcgagatcagcctgaccaacatggagaaaccctatctcttctaaaaatacaaaattagtcaggcgtggtggcacatgcctataatcccagctactcgggaagctgaggcaggagaatcgcttgaacccaggaggcagaggttgcagtgagccaagatcgtgccattgcactccagcctgggcaacaagagcaaaattccatctcaaaaaaaaaaaaaaaaaaatcccagatgacttcactgttgaaattgaaaagattattctaaaattcacatggaattgcaagaccttgagaatagccaaaacaaacttgaaaaacacgaacaaaatataggatgactcacttgccaattgcaaatgttacgacacagcaacagtaatcaagactgtgtggtactggcaaaagacacatacatacatacatatcaatggaatataattgagagtacagaaacaagcctaaacatctatggtaagtgcttttctatttttttctttttttttttcttttttgtagagatagaatctcaccatgttgcccaggctggtcttcaacttctgggctcaagcaatcctcccactgtggcctcccaaagtgctgggataactggcatgagccaccacatccagcccagatgattttcaaaaaagtcaacaagaccattcttttcaacaaataggtctgggatgatcagatagtcacatgaaaaaaaaaatgaagttggaccctccatcacactaaagtgctgcgattataggcatcagccaccacatccagcccaaatgattttcaaaaaggtcaacaagaccattcttttcaacaaataggtctgggataatcagatagtcacatgaaaaaaaaaatgaagttggaccctccatcacaccatatgcaaaaattaattcaaaaatgaattgatgacttaaacgtaagagttacgactgtaaaactcttagaaggaaacatacgggtaaatcttaaagacgttaggtttgacaaagaattcttagacatgacaccaaaagcatgaccaactaaggtaaaatagggtaaattgtacctaccaaaatgaaaaacctttgtgctggaaaggacaccatcaagaaatggaaagccaaaatagccaaggcaatattaagcaaaaagaacaaagctggaggcatcatactacctgacttcaaagcaacagtaaccaaaacagcatggtactagtagaaaaacagacacatagaccaatggaacagaataaagaacccaaaaataaatccacatatttatagtcaactgatttttgacaatgacaccccttcaataaatgatactaggaaaactggatatcgatatgcagaagaataaaactagacccctatctctcaccatatagaaaaatcaactcagactgaattaaagacttgaatgtaagacccaaaactataaaactactggtagaaaacataaggaaaaacgcttcaggacattggtccaggcaaagatcttatggctaaaacctcaaaaacacaggcaacaaaaacaaaaatggaaaaatagcactttattaaactaaaaagctcctgcacagcaaaggaaacaacagaatgaaaagacaacctgtagaatgggagaaaatatttgcaaactatccatccatcaagggactagtatccagaacacacaagtgactaaaacaactcaacagcaaaaaagcaaataatctggtttttatatgggcaaaagatctgaataaacattctcaaaggaagacatacaaatgtcactatcattctgccagtaccacactgtcttgattacttgttagtgtataaatttttaaattgggaagtgtgagtcatcctacactttgttcttgtttttcaagtttgttttggctattctgggagccttgcaagtataaaatagccaacaagtatgaaaaaatgctcaccatcactaatcatcagagaaataaaaatcaagaccactatgagatatcctctcactccagttagaatggctactatcaaaaagacaaaatataatggatgctggcaaagatttggagaaaggggaactcctatacactgtgggtagggatgcaaattggtaatggccattatggaaaataatactgaggtttttcaaaaaactgaaaatagaactaccatatgatccagcaaccctactactgggtatttatccaaaggaaagaagtcagtatactgaagaaatatatgcactctcatgttaattgcaacactgttcacaacagccaagacagggaataaatctaaatgtgcatcaacagatgaatggataaagaaaatgtggcatatacactcaatagaatactattcagccattaaagaagaatgaaatcctgtcatcccagcaacatggatgaacctggaggacattatatttaatgaaataagtaaagcacaaaaagataaacagtacatgttctcactcagacatgggtgctaaaaagaaaatggggtcacagaattagaaggggaggcttgggaaaagttaatggataaaaatttacagctatgtaagaagaataagttttagtgttctatagaactgtagggcgagtatagttaccaataacttattgtacatgttcaaaaagctagaagagattttggatgttcccagcacaaaggaatgataaatgtttgtgatgatggatatcctaattaccctgattcaatcattacacattgcatacatgtatcaaattatcactctgtacctcataaatatgtataattattacgtcaacaaaaaaaggaaaaaaaagaaaattaagacaacccacataatggaagaaataaaatatctgcaaattatatatatctgataaatatttaatatttataatatataaagaactcctacaactcaagaacaacaacaaaacaacccaattcaaaaatgggtaaaagccttgaatatacacttatctaaagactatatacaattggccaataaagacacgaaaagatgctcaacatcactagtcatcagggaaatataaatcaaaaccacaatgtagaatgtagacaccacttcatatgcactaggatggctagaataaaaaggtaataacaaatgttggtaaggatgtgaaaaaatcagaaacctcattcgctgctgttgggaatgtaaagtgatgcagccactttggaaaacagtctggcagctcctcaaattattaaatacagagttaccgtatgacccaggaatattcctcctgggtctataaccaaaaaaatgaaaacatatatccacataaaaacttgtacatgggcatttatagcaacattattcataacagcaaaggtggtaagaacccatatgcccatcatctgatgaacaggtaaataacatgcggtattatccatacactagaatattatctgcccatacaaggagtgacatccagctacatgctacaaggatgaatctcggaaaccttatgctaagtgaaagaagccagtcacaaatgaccacagattatgattccatgcatcggaaatgaccagaatagggaaatctatagagacagaaagtagattagtggttgggtggggctgggaggacaggtagtacactactttcccagaactactggaacaaagtaccacaaactggggagcttaaacatagaaattgatttcctcacagttctggagactaggactctgagatcaaggtgtcagcagagctggttctttctgagggccctgaggcaaggctctgtcccaggcctctctccttggctggcaggtggccatcttctccctgcgtcttcacatcatcttttctctgtgtgtgcccatgtccaaattttgattggctcattctgggtcatggccaattgctatgcacaaagtgaagtctacttccaaaagaagggaagagggaacactgactaggctaaacttatagtcattttaatgtccgcttttcctatgagattgtgaacacacagaagtagggtttttatctacattgtgcaaagtttaataagaaaaatagaattcaagagaagcagttcaatagcaggaatttaatatgggaactaattacaaggtttagggcaggactaaaaagccagttgggatggtgagccaacccagagattagcaacagtgggaccccatctacctaccacccatgaagctggaaggataaaggaggggctattatcagagtccacaagccagtgtcagagtccttggctggagctgggaccaccctagagacactgtgcaaagcagaaaacaagggggaaaaaccctgacttctcccttcctcccacctttcaatctcccactagtgcttcctactagccatacttggccagagacagtgacaaggaacactgcaaaatgaagtttgtaggaatcatctccctctgagacagagaaatatggaagggtagaaaatgaatcagaggataaagagaaaaaaccctgagtactatcttatttatctttgtatctccagtgcctaatctgtctctcaaaaaaggaaagcaattgagagaaactgaaaactccaattgaaatgaaagaatggagaattactggactagaagagaagagaaaaatttattccgcatagagtaaacaagaatggattcacaaaggacgtgatgaatgaaaagctataatcagcaaagatttgccagagaaattaaaaagtggtaaactcagccacgctgtacaacctgaaggcacaatgcatgaaaacgtttcaagaaatgacaagatttgaagtcaaattctaagtgcttttccagaatctctcaagacgattatatagctaccccattttattaaataaaatggaaacttactaaactttccccttgtattaaactaacatatgtcctaatagcaaacgattctggaattcctagagtaaaatatatttcgtcaaagtgtattgctcttttaatattctgctgacctccttttgctatttaggatatttgtatacacatcacacgtaaatttggtctatagtttacatctacgggcttatactgttctttttttcatttttttaaaatttccaacccccagtatccatatactgctctctatcagggttattttaactttgtaaaatcagctgagatgctttccatgttttttttttttattttctgccacatttgaatagcataggagttaccaccatcaaccttggattatttaagcattcacgattccacgtgtggattttttattcagagtctttcttgtcattcctgctatcagcacagaacccaatctcagctttccagctatactctcaccccatggaatttgcagatgaagttcaaaaggacctttgcattatcctgcctcgccctcttcccccttcatttagacatcaccttcttctagaacgtcttacctgacatgccctgctcccaacccctgctgcccaattgtgtgctctcccgtgtcctggcctgccatcctctttagtaattgcctgctccctcatctgtctccccacccagacattaagctgaatagactggatttgtgtcttgtccatcactataatctcagcacctagtacctagtaggtacttaccatgtattcattagcaaaatgttatgtataaccttgcaccttaaaaacaagagaaggaagacaaaattaagtcttaagactatggtttagaacatggatcagaaactacagtctgcagcccaaatccagaccaaatgaagagaccatgttcatttacatacaacctatagcagctttcacactacaggagcagagctaagtagttccaagggaacacacggccctgcaaagcctaaaatatttactctatagctcttcacagaaaaagttttcagatccctcgtttagaactcttgttcatatgcaatttcactaaaccatagttttttgggtttgtttggttttttttggcaaaaaggaatgagccgatccagaaaaggttgaaaagaatgaatcattactgctgaaagaatgtgcacacagtccgtcagtattctgctgccatgctgacacccatccaatagtgtcatgagatgcagcagctactactgtgttctcaatgccgagtccacccactccataaccatgtccaagcaatcttgggaacatcatcaccatgcttgtttatccttaaggtattgcctcacatacagcagtggctggtcataaagtcaaatgacactagtggccaggaggtcaagagaatgagtgaggacaggtgggtaggcagcccaggccctagcaacagcaggagctcacccctcagtcactctagccaggactgaaatacttttcaccctttcaagagagactaggaatctggatttttatgtgaaatatcttgattactaaatgttgtcaacagacatgtcaaaaggtaaaactaagtaagttcatggggcagattgactattcaggttatagaattaaggattcttatccaacacagataccaaccaaaaagctgacgtataacatattaggagaaactatgtgcactgtcgaaacatcaacaaggggctaatgtctaaaatagtctatattggattccagttgaaacatggggaaaggacatgaacaggcaacttatgtcaatggaaactcaaaaagataacaagcatatataaaagcattctcaaattcagtagtaaacagacagatgcaaataaaaagagggaaactgctgccgggcacagtggctcacacctgtaatcccagcactttgggaggccgaggcgggcggatcatgaagtcaggagatcgagaccatcctggctaacatggtgaaaccccgtctctactgaaaacacaaaaaattagccaggcgtagtggtgggcaccagtagtcccagctactcaggaggttgaggcaggagaatggcatgaacccaggaggcggagattgcagtgagccgagaccatgccactgcactccagcctgggcgactgagtgaaactccatctcaaaaaatataataataattataattataataataataaatagtaaataaataaaaagagagagactgctaaagtctagaaagttgaatgatgccaagcgcatgcaaagatcagggccttgggatggccgggtgcagtggctcacgcctgtaatcccaccactttgggaggccaaggcgggcggatcatgaggtcaagagatcaagaccatcctggccgacacagtgaaacccggtctctactaaaagtacaaaaaaatatatatatatatatatattattatattatatatatatatatcagagccttgggaatccttgtgtgctgctggggaaggtagtggtgcagccacccttgacagcaatctggcagtacttggttatattaagtataggcacacaccacgaccaggcagtcctactcctgggtctaaatcccaaagaattctcacacaagtccataaggagacatgtacgaggctcattcagcattactgggagtgggaatcaacctgggtgtccatctacaggagacgagatggacaaaatgtggtggatattaagaccagaatcaccaagtaacagagatgggtggtgagtgacaatcctaagatacagaataaaggctagaacatgatgccattcatgtaaattaaaaatagatgcacacaaagcagtatacgcgtgacccttgaatagcacaggtttgaactgcctgtgtccacttacatgtggattttcttccacttctgctacccccaagacagcaagaccaacccctcttcttcctcctccccctcagcctactcaacatgaagatgacaaggatgaagacttttatgataatccaattccaaggaactaatgaaaagtatattttctcttccttatgattttctttatctctagcttacattattctaagaatatggtacataatacacatcacacgcaaaataaatgttaattgactgtttatattatgggtaaggcttccactcaacagtaggctgtcagtagttaagttttgggagtcaaaagttatacacagattttcaactgtgcaggcaatcagttcccctgaccccctcattgttcacgggtcaactgtatatacacaaaagtattatatgaacctcattagaatagctgtctatagggagaagagaatgagagtgggataaaacggaatgaacaaataaaccaacaaatgcattaacaagcaaaacaacagaggggcttgcatgggccagtgatgataaagggctaagaatgagaatataattaattcaattcctcacacctgaggtctaaaaccaaggaaagggagggccaggcgtggaggctcacgcctgtaatcccagcactttgggaggctgaggcgggcggatcacaagattaggagtttgagatcagcctggccaacacagtgaaagcccatctctacaaaaaatacaagaattacccaggtgtggtggcacatgcctgtagttagctactctggaggctgaggcaggagaatcacttgaacccaggaggcggaggttgcagggagccgagatcacaccattgcactccagcctgggtgacagagtaagactctgtctcaaaaaaataaaaaaaataaaaaaacagagaaagggaggaaactagatccaggctgactagatacagcctttagagttagaaaagatgatttgacaatctaagcccacactcagattgaatgaaattgaaaagcctttcaaactaaaacatttaattacaccatctgctgcagacagaactcagacaactcaaacaggtaatgtcagcgtggtgttttatatcaccaccctcaacacagaataaaaatcagctgcatgtgaagcagtgactagaatgaagaaaaggctgcttcttacttccttctagtggttctttccgaaaacattaataggcaccagctctatgcatgtcaccctgcagggagacatggggtatataactatgacttactgttcattcctcaaggaattcccaatcttgtggaagattatacacaatgaggcaacaaaaactatccaataaaaccacggaaaagaagccagtgacaaagaagccagtgatgaaaggccctgtgagcagagctgatggccatttggggaagaaagaccaacatggatgggggtgatcagggtggctccgtgggaaagctggaagagaagtggcagatctctgagctggatgatgggccactaccatctgtatatggctaattaaagaccatgtgtggattttttattcagctctttcgtgtcattcctgctatcagcacagaacccaatctcaactttccagctatattgagctaaacttctcacctcatggaatttgcagataaagttcaaaaggatccttgccttttcaaaataattttgaatggttgagtagtccctctgtgctctctcactgacaccctctcaaggctgctgagcacgtgccatgctatggctttctccaacatcaggaaatgttctccactcagtttcaccttaatacaaatgtgttctctcttcagagaaggcaaaaaaattcatgaccatctgactgggagaagtcatttctaggtaaagtgtccatctttttctgaggaacacaggaggaaaatcttacagaaaagagttaacacagcaggcctaagactgctttttaaaataaataaataaataaataaataaataaataaataaataaataaataaataaatgaatgatagggtcttctgtattggccaggctagtctcaaattcctggcttcaagagatcctcccaccttggtctcccacagtgttgggattatagacatgagccattgtgcttggcccaagactgttattcttaaaaagtctcataaaaagcatggttaatccttggctggcacctgggaacttagatttcagaagggttcccaccatccaacctggaaagagggactcactgtgcctaaattattgtgtggtttatgctgaactcctgcttttcttcaggtagcgtggaatgtggtatgtgctgggcaaagggggcctgcatgaccagcccccaataaaaaccctgggtgttgggtctctagtgagtttccctggtagacagcatttcacatgcgttgtcacagctccttcctcggggagttaagcacatacatcctgtgtgactgcactgggagaggatgcttggaagcttgtgcctggcttcctttggacttggccccatgcacctttccctttgctgattgtgctttgtatcctttcactgtaataaattacagccgtgagtacaccacatgctgagtcttccaagtgaaccaccagatctgagcatggtcctgggggcccccaacacagaaataaattataaaagaccaaggactgggcatggtggcccatgccggtaatctcagcgctttgggaggccgaggcaggaggaccagttaagcccaaaagttcaaagttacagtgacctatgactgcgccaatgcactctaacctgggagacagagcaagaccctgtccccaaaacaataaactaaacacatacttctgccttccaagtgtcttaaaattcaatggaatggtagaaacatttttaaaacactaaatcaaaagaaacctggaaaacaagagtgccgatggccaactaaaatgtctaggaaatttctgaaaagtaaaaagtactcagaaccagattacctgagcaaaccatagcccaatacaagcttgggaggaggctgttatgcagaaggaaatggtaacaggtttccaggaacagacttgtaacagcagatagaacagcagaggtagaacctgacaaggtgattacctggggaactgcagtctgaatgaccaggactgttggacccttcccctcacatggaatacacacgccactcagcagcacaccacagctcttcaacaatcacaggaggcacgctacgcctagtaagacaggaaaaaaggaattctcaaacttcgaagatgaacacataaagaatcaccaagtttttattcagtatgatgaaacagggacactgaatcaacagaacacaaacccaagcaaagataattactagagcacatagaagaaattattagatattcttgggaagacctaaggggacattataaagagcaagcagttggtatgtgacgatctttgtgatataccaagaaataaaaacacaggatgaagaccagatagagaataatgctactatttgtgcaaaaaaggagaaatggagaatctgattcatatttgcttgtatttgcatgaagaaactttggaaggtacataagtaactaacaacaatggttacctacttgtaaggcgagagaagtaagaggacaggaatggtgggaacaccttttgtgtccggaattggtgggttcttggtctgacttggagaatgaagccgtggaccctcgcggtgagcgtaacagttcttaaaggcggtgtgtctggagtttgttccttctgatgtttggatgtgttcggagtttcttccttctggtgggttcgtagtctcgctgactcaggagtgaagctgcagaccttcgcggcgagtgttacagctcttaagggggcgcatctagagttgttcgttcctcctggtgagttcgtggtctcgctagcttcaggagtgaagctgcagaccttcgaggtgtgtgttgcagctcatatagacagtgcagacccaaagagtgagcagtaataagaacgcattccaaacatcaaaaggacaaaccttcagcagcgcggaatgcgaccgcagcacgttaccactcttggctcgggcagcctgcttttattctcttatctggccacacccatatcctgctgattggtccattttacagagagccgactgctccattttacagagaaccgattggtccatttttcagagagctgattggtccattttgacagagtgctgattggtgcgtttacaatccctgagctagacacagggtgctgactggtgtatttacaatcccttagctagacataaaggttctcaagtccccaccagactcaggagcccagctggcttcacccagtggatccggcatcagtgccacaggtggagctgcctgccagtcccgcgccctgcgcccgcactcctcagccctctggtggtcgatgggactgggcgccgtggagcagggggtggtgctgtcagggaggctcgggccgcacaggagcccaggaggtgggggtggctcaggcatggcgggccgcaggtcatgagcgctgccccgcagggaggcagctaaggcccagcgagaaatcgggcacagcagctgctggcccaggtgctaagcccctcactgcctggggccgttggggccggctggccggccgctcccagtgcggggcccgccaagcccacgcccaccgggaactcacgctggcccgcaagcaccgcgtacagccccggttcccgcccgcgcctctccctccacacctccctgcaaagctgagggagctggctccagccttggccagcccagaaaggggctcccacagtgcagcggtgggctgaagggctcctcaagcgcggccagagtgggcactaaggctgaggaggcaccgagagcgagcgaggactgccagcacgctgtcacctctcactttcatttatgcctttttaatacagtctggttttgaacactgattatcttacctattttttttttttttttttgagatggagtcgctctctgtcgcccagactggagtgcagtggtgccatcctggctcactgcaagctccgcctcccgggttcacaccattctcctgcctcaacctcctgagtagctgggactacaggcaatcgccaccacgcccagctaattttttattttattttttttttagtagaagcggagtttcaccatgttagccagatggtctcaatctcctgacctcgtgatccatccgcctcggcctcccaaagtgctgggattacagacgtgagccactgcgccctgcctatcttacctatttcaaaagttaaactttaagaagtagaaacccgtggccaggcgtggtggctcacgcctgtaaccccagcactttgggaggccgaggcgggcggatcacgaggtcaggagatcgagatcatcctggttaacacagtgaaaccccgtcgctactaaaaatacaaaaaattagccgggcgtggtggtgggcaccggcagtcctcgctactggggaggctgaggcaggagaatggcgtgaacctgggaggcagagcttgcagtgagccgagatagtgccattgccttccagcctgggcgacagagcgagactccacctcaaaaaaaaaaaaaaaaaatagagacccggaaagttaaaaatatgataatcaatatttaaaaacactcaagagatgggctaaagagttgacggaacaaatctaaatattagattggtgacctgcaaaaccagcccaaggaacatcccagaatgcagcccataaagataaagagagcatttccgctgggcacagtggtatggcaggggaattgcctgagtccaagagttgcaggtcacattgaaccacaccattgcactccaggcctgggcaacacagcaatactctgtctcaaaaaaaaaaaaaattaaattaaaaaagacagaatatttgagagaaaaaaatgcttatttcaagaaacatgaaagataaatcaagatattctaattcccaagtaagaataattccagaagcagaaaatagaatagaggcaaggaaacactcaaaacttctccagtgccatagaaatgtgtattaatctttagaatgaaacggactaccaaatgctgagcaggaagaacaaaagagatccactcttaagccagtgtggtgcccaagcgcagtggctcatgcctgtaatcccagcactttgggaggccgaggcaggtggatcacctgaggtcaggagtttgagatcagtcaggccaacatggtgaaaccctgtctgtactaaaaatacaaacattagctgggtatggtggtgcacatctgtaatcccaactacttgggaggctaaggcaggagaatcacttgaaaccaggaggtggaggttgtagtgagccgagatcatgccacactcccagcctgggtgacagagcaagattccatctcaaaaaaaaaatccactcctagacaaataatagttaaattttagaacaccaaggagaaagaaaaaaaattgtaaagcttcagagaaaataaacattaactacaaagaaacgagagtcagacgcgtgcacttcttcctagataccagcagataaagcaatatctccaaaattcagaaggttttaacgtagaatcctatacccagtcaagaatattcacatggaaaagtgaaataaaaaacattgtttaaacatgcaagggttcagaaagtttaccattcacagaatccctgaaaacaaaaccaaataatcacttaaggactcattaagaaaacaaatgaaataaaagcaccaatgatgagtaaataatcagaaaaatttacagtttacctaaataactgtttatgcataatgtatgaaaacccaaaaatttaatatgggacagaattaaaatcatgataagattcttttttgctttactcatggagagttcacataaacagattatcttttaatagcaagagaaaaaaatgtttagatatgtgtgaaaaactaagggtaccaaaacagtgcaaattcatttatcatcaggaaaatccaaattaaaaccacagtatccaccagaataactaaaaggtaaaagacagaaattaccaagagttggcaagaatgtggagcaaccacatatacttctggggtaaataagttggtgcaaccggtactgaaaactgtttgctagtatctactaaaaccgagcacatgcacagactacaaccaagcagttccactcccagatacacactcaacagaaatgcacacactcactcaacaaaagacgtgtactagagtgttcatgtacttactattcataatagtccaaaaatgcaaacaaccaactgccaatcaaagtcaaatgtatatctatattagggatatatacaatggcatatacacagcaatgagaatgaaatgaaccagctcggcacagtggttcatgcctgtaatctcagcactttgggcgggtaaggcaggcagatcacttgaggtcagaaatttgagactagcctggccaacacggttaaaacctgtccccactaaaaacacaaaaattagccgggcatagtggttgcaggcctgtaattccagctactcgggaggctgggttgggagaatcgtttgaacccgaaagccggaggtcgcagtgagcggagatcgtgccactgcactccagcctggacgatagagcaagactccgtctcaaaaaaggaaatcaaaaatataaaataagatgacaggaataatccgcaaaagatcagtaatcaaaataaatataaatgggctaaagctacctattaaaagacaaagatttcacacccataaggatagctactatcaaaaaaagagagagaataacagatgttagcaaggatgtatggaaactgaaattctcacgcattgctggtgagaatataaaatggttcagcctctgcggaaaacactatgctgggtcatcaaaaaattaaaaatagaagtactacttgatccaacaattctacttctgggtatatacccaaataactgaaagcagggtcttgaagagatatttgtacacccatgatcatggcagcattattcataatagctatgatgtggaaccaacataaatatcctttgataaatatatggataagcaaaatgtggtgtatacattcaatggaatattaattagcaataaaaatgaagaaaattctgacacatgctacaacatggatgaaccttgagggcattacattaaatgaaataagccagttataaaaagacaaatactatatgaggtactatattagatactcatgcaaggtacctaaaataggcaaattcatagagacaaaaagcagaatggtggttgccaggggctgcggtaatggatacagagcttcaattttgtaagatgaaaaaattctggagattggttgcataacaatgtgcacacacttaacactggggaactgtaaacttaaaagtagtaaatggtaaaaataaaaataataaataataaattttatgttattttaccacaatatttattaaaagacaaagattaactaattaaacaaaatccagccataagctaatggtaagagtaacaattaaagaagacacagaaaattgaaaatcagtgactagaaaaagatattccatataaatgctaacaaaaagcaagtacagcaatataaagagaatgaacaaaaaaaaaattaaataagatggctcgtttattcccaaaaggtacaattcaccaagaagatacaagaattgtgaacctttaagcacataaaacagcttcaaaaatacaacatttaaagaaaaatatatattaaacatagaaatagtacaaaaacccctacaagaatcataatgggagtcttcaatacaactctccatatcaacaggtcaaacagagaaaaaaaataagttaaggatgcagaaaacctgaattaccatcaataaacttgagattaatatagaactgtatacccaatatactaagagttcagggaacagtcgtgactgacagtggactgcaaattaatctgttcttaatctttgtttttctttcagcactgtggcagaatagagatcctaaaaaccttccagctacaaaacatctttttaaaaatataaaaaaatacaaaaataactctgaaatcaatagaagacacatggtgaaaccaaaattctagaatacagggagaataaaggcattttcagatattacaaaaacagaaaattgatcattgctgaagtaatttctaaagaatgtacttgagggagaagaaaaatgttccaaagaaaagtatctgtgatacaagaaggaatggaaagtgaagaaatggtaaacaggtagataaagctaataaatgttgacctagaaaataacaaaaacaatagcaataatgtctcgttggaagggttgaagtaaaaatacaattaaggccaaatgtgaggtaagtggaatgaaagaattagaagtccttgccttgttcacaggactgattaaataaatgagccaggttttccattcaaacagttaaaacttgaacaaaataaactcaaattaagtagaaagataaaaaacagaaattaatgtcatagaaaaataaaaaatcaatagaattaatcaataaatcctggttaataaaagctggttctttgaaaggattaataaaataatcattaagcaagtctgatcaaaaaaaaagagaaaaggtaccaaaaaaagtactgtatcagaaagagaacatacagatacatacagatatgtaagagtctgttttcttacaccagaatactatatacaacattatgctagcatatattaaatttcaataatgttaatgattttctaggaaaacagaaaatattaaatttactttgaagaaacagaaaaactgagaaaaataaatgatcatgaaaaaaatgaaaaggtaattaaatactgatattaactgcctaaacaacaccagcagcagcccaggcagtctgcagtcaagttctgccaaacttgagggaacagataattcttctattccagagcatagaaaatgatggaaagtttcccaatttaatcagagaggacagcctgatccttgttatgaacacagataaaaatggggtaaactatatgccaaactcagataccaaaaccctaaataagatgctagcttattgatgtgaacaatccaaaagtgcattttaaattagcccagggttttagagaaagaaaatctagcaatgtgaccaccacttatgttaacaattttaagacgaaaatctacatgatcatatcaatgcatgctacacaaaagcatttgggcaaaaaacccaacacccacccttgactttttaaactcttagtaattaggcataaacagaaatgtacttaatgtgatagaatacactcggtgaagatacagagggaatgctccctaaaaccaagcccaagacaaagattcctatttaacctcaatagtcaacactgcagcgagagtaatctatggaagacaaggaaaaaagtaaaaacatgagagacatctgttgtttaacagacaataagatcacctacttggaagaggcaaacgaatcaagcgaaaaactattaaaactgagacaggctttagtatggaggctcagcttcagctgtagtttgggctaccaaattcaactcgcttgcttggagagttaatcctgcaaagctaatttctgttgaggtattaggattgacaagcctgtgctcctccctcctcccccatcttcaacactgaaataacacggtgtttggaactggataacagaatcttccaaaaacaaaaattgtcctgaagggctgacttgtgcccttactcaaaaaacactttatctgctgcctgcagctcctacagttgctggtggataagcctgccaaccagctcggcgtaattcttcctgcagagggcaaggaagagcactttcacaggaaaatttttttccgaactgtatgccgcttattacataaacttacgtgctggcaaatggagctccagcaaaataagatattcagagtcaaacttccttaggaaaaaaaaaaaaaaaaagcaagcacataacactaatttccttgcatgggcactggggaaggaggtcgttacttccgcacgcccgcaggtccgcaccaccgggaaacccacgggcaccgcgcgctgcccccgggccttccaggtgcactgcgccgcggcgccccagctgacccgggatgcgcagccctagcccttcccctgtcaccccggccaggaaggggcgggagcgcggcggacgccgagggcgaagggcttctcggtcctctgcaccacgcagcacccccaaggcacaacagggagggtgcgggaggctcccgagacccaggagccggggccgggcgtgcccgcgcacctgtcccactgcggcgagggctggggtcgcctccagggccgcagctgtcgggagccacctggctctcagtcccgggtccctgcgacaaccctcgggcccggaggggaggaggcggccacctgccgctgccacctgcggcaccggtcccaccgctccgggccgggcaggacaggccaggacgtccctcctgggctggggacaggacacgcgacgaggggaccggggcccccgcggcgaagacgcagcacgccttcccagaaaggcagtcccgtgcccccacgacggactgccggacccccgcgctcgcccgcccatcccttcagaccacgcggctgaggcgcaaagagccggccggcgggcgggctggcggcgcggctagtactcaccggccccgctggctcagcgccgccgcaacccccagcggccacggctccgggcgctcactgatgctcaggagagggacccgcgctccgccggcgcctccagccatcgccgccagggggcgagcgcgagccgcgcggggctcgctgggagatgtagtacccggaccgccgcctgcgccgtcctccttcagccggcggccgggggccccctctctcccagctctcagtgtctcatctccctatctgctcatcctctggtcgcacataatcgatgtttgggcgtcccaagccagatgtggaccccatttccgcactctacactggaggttttctaagggtggtgcccggaccagcagcttcagcctcatctgggaacttgagaaaatgcagattctccgtcccacccagcctattcggtttttcctgcactaaaaccatgaaggtggggcccagcagtccacattctcgcaagcccgtcaagtgattctgaggcgccctccagtttgagagctatgctcacggcctcacctccgccccgcaaggagcccggtcttgcctgtggcgctagccgcacacggacacctcatcctgcggggcccgcccccccgctgcaccctcaccgcccaacgcctcctccgggatgcagcggaggcgcctggaagtcggcaaggtcaacatccccctcagcatcttccctaccctcacggctcctcctccaggggtgcctcatggccaggggttagaaagagccactgtgtttcttgacatggaagtggcctaagaccttaatgaaaactgcaggagtggaatgacagaacctttggtcatacttgagggcgtgaagctcaaatgaggaggaaggaaaggatccagggagaataaccaaccctggcaagttgtggcgcccaggtagaggggcgagcctaggctagcggttctcgaccagggccggtgttgcccctcctcgccgccccgcgtacatttggggaggtctggagacatttttggttgtcatgatgcgggagttgctactgttgcctaagtgggtagacacgagggtgctcctcaacatcctacctgaaggacaggactgccccacaaggaagaatgatccggccccaaataagaaaccctgggctggtcagcaacaacccctttgttctgagaagagaggaggaaagaataaaagaagtggggtgaagttttggtttggtagaggaaacttgaagacattttcactggaaaggaagagaggaagaggagggagatgtctgtaaggacgagcaaaccgggtgacagctgatttcctcatattgaagtaatgagtcctagttataataaattcctaataaaaacccagtttatccctgcaataaacttgtcttttttttttaaatatactgcttgattctgtttgctaatattttatttacaggctttgcattgatatgcaaaaatgagatgggcaataattttctttttgaatgtctaatgttgtttggtttcagaatcaatgttatgctcacatcataaaaaatttggaaccgaggcaggaggagtgcttgaggccagaagttcgagaccagtctaggaaacacagtgagacccccccatctctacaaaaaaaaaaaaagaaaaaaaaatgggcatgtttgctttttccttttactctgaacaatttaaggagcattaaaattatctattctttgaggtttgatcatttcccagttaaaaatgttcctcccagcctgatgctttctttggggagggtaaatcttttaaggctagaaaagtttcttctgtggcaattttattatttacattttaaaaattattctagagttaattttgataaagcatgtatttcttaaaacaaattatcctttttttccagatgttcaagtgtatttgcataaagttgaggaaagtagtcttttgtgaatcttttaacttctcccaaatatcttattttgtgtatttttgcttctttattttgttaacttttaaaagtgtatttttttttcaaagaatcagctcttaggtttatgtttttggttatactggagcttttttcttcttctttttaaaatattttttctcctttattttttagacgtattttgatctaacgtaatcggaagaaggtaaattagaatcttttgttactattgtgtttttatttctccttatttctctgaagtcctgctttataaatagtaccatgttatttgtgcataaatattcatttgtcttatattcttgggaattttcccacttcatcataaaatgaccttccttgtctcatttaatgtgttcaaactttgccctgaatttaactttgtctgatattttaccatcctgctgaattttgtttgttaccccaaacaacctttgctgttttcgtcttttctgaaccctttattttaggtaatcccttgaattagagcactaagttttgctttgtgattaaatctgaaaatctttatcttgccatagatgagttgagccctattcatgtgacagctatattatgctgtttcatagcccttttggtccttttttcactcttgcattgcatattttgtgtttattgtgttttgtgtttcttctgataatttggaaggtttgtatttttattcagggagttgccttataatcatactccgcaatacacatcgtcctcagtttcttcagactgtctgttaactccctattctgaataaaaatgacattgtaatttccctcttttttctttaccccttttcttctcctcacctaatgtaaatgattttatccttctttagtatttgcttttttaattaactacatttataaatatctttatcacttgatttttaaatcagctttgaatgagatatttggattcctagatataaaagatgttaattataccatttccacgttagtaggtttataaaatcatacattctgctgtgtaaccataatcccacgtttgttttagttccactcctacagttaaaagattcagaagtattattaacagttattttgccatagttttttccccaacccattttgtggtaagttatgatcctgctttagtttcttaagaataatttatagagcagagtgtggtggctcacgtttgtaatcccagcactttgggagacaagaggtagaaggatcgcttgaagccagcagttcaagaccaccctgagcaacatagtgagaccttgtctctacaaaaaattttaaaatttagccagacgtagtggcgtgtgcctatagtcccagctactcaggaggctgaggcaagaggattgctagagcccagaagtttgaggctgcagtgacctctgattgtgccactgcaccccagtctgggcaagaaagtgagaacctatctctttaaaataacaataataacttatgaaaattatattccctgagtttttcatgtttaaaaatatttgttgcctttatcctgtaaaagtttgagtataaattcttgggttatactttatttattgaagaatgtataagtattgtcttctagaattgagtgttgctgtaatgaaaccagaagtcagcctggtttatttttcctcagaaatgaggtaattgccggccggacaccgtggctcatgcctgtaatcccaacactttgggaggccgagacaggtggatcacgaggtcaggagattgagaccatcctggctaacatggtgaaaccccggctctactaaaagtacaaaaagttagctgggcatggtggtggacgcctgtaatcccagctacccgggaggctgaggcaggagaatggcgtgaacctgggaggaggagcttgcagagagctgagatcgcgccactgcactccagcctgggcgacagagtgagactccgtctcaaaaaaacaaaaaaaaaacaaagaagtgaagtaattgccatgatgctccaagaattatctctttgtctatgaaatccagaaatctcactgttatacattttggaattattattctgggccaatatttcctgggacacaatagattgactctatagatttaattttttttttttttttgagacagagtctcactgcaatctcagcttactgcaacctctgcctcacgggttcaagcaattctcctgcctcagcctcccaagtagctgggactacaggcgcgtggcaccatgcctggctaatttttgtctttttagtagagacagggtttcaccatgttggccaggctggtcttgaacgcctaacctcaagtgatccacctgcctcagcctcccaaagtgctgggattacaggcgtgagccaccatgcccagcctcaattcctctttctatctggtaatttttctgaagttgaaaacatttgttctaatacgttatttcagtgttcttctaagatgtgtaaagcaccctattcccaggtcagcccccatcttgctagtgagctcggctggttcttcacaagagctctggttttctcctgcttaatctcaagtacctctgtcagcctccacctggtttatgatttggagttttttggtttttgttttttgtttttgacagagtcttactctgtcacccaggctggagagcagtggcataatctcagctcactgcaacctctgtctcccaggtttgagcgattctcctgcctcagcctactgagtagctgggattacaggcgcgtgccaccacacccggctaatttttgtatttttagtagagatggggtttcaccatgttggccagggtggtcttgaactcctgacctcaggtaatccacctgcctcagcctcccaaagtgctgagattacaggcgtgagccaccgcgcctggcatggtttggagttttaatctgtagttttaataaagatagtgcttatgtttgtgtttcttatatttcttggtactcttgggtaatttgtaagatccccatatctacacaagaagtccattttcaattcttttcttcagactgtttattttattttattttattttatttttatgtttgagatggagtctcgctgtgtcacttctggaggctggagtgcagtggcgcgatctcaggtcactgcaacctccgtctcccgggttcaagcaattctcctgcctcagcctcccgagtagctgggattacaggcacctgccactttttaatttttttagagacagagtctcgctttgttgaccaggctggagtgcggtggtgcaatcatggctgactataacctccaaatcctgggctcaagtgatcctcctgcctcagcctcctgagtagctgggactacaggcacatgccaccatgcccagttaattttaatttttttgtagagacagggtctccatatgttgcccaggctggcctcctactcctggcctcaagtaatcctcctacctcagcctcccaaattactaggattataagcatgagccaccatgcccagccttgttctactactttaatttcatatgttaggtgaccatgtaattgatcatccaaaccaggatactgtaagaatgaaagaggctgacagtagtatgatgctgggactagcattgtgcactgagattatttctgggaaagcaggagatacggtcaccctacttatagtgtgcttgtctttggattgttgaatttggagtttctatttgcaggcttatttcaactgggcagccttgatccgccctgcccagcaatgctaccgttctctccaccgggtctctgggaccccttcagtcactatacttagctcagttccccaccctcccactccctaaaagcgtaaccaggaatcctgcctcaggtctactgccgtcttccgtgggctgtttcagttcctattacccagagtcaaactcccagcattccctacctgattccagacttggagtccagagctttaacctcttcaggccaactccccactttgcatttctgtccctatatcttagtccatggagatacatttcatgtctttgagtctacttacaaagtaaattttgctgttttttaattttttttttgagatggagtcttgccctgtcacccaggctgtggtgcaatgacgccatctcggctcactgcaacctccgcctcctgggttcaagcgattcatctgcctcagcctcccaagtagctgtgattacagacaggcaccaccacgcccagctaattttttttatcttttagtagagacagggtttcaccatgttggccaggctggtcttgaattcctgacctcgtgatctgcccatctcggcctcccaaagtgctgagattacaggcgtgagccactgtgcccagccaattttgctttttttatatttcattgctatatgtttagaggataagtttacagtgctatatgcattcccaaatattagaccaaaaaaatctccaaaaaattagaaagaaaatccaaaaaatctcaaaaaataccaaaaagcaacaatctcacagaccatactcactgacccccaataaaataaaattagaaattaaccacaacttaacaaaataaagtactcaagtcagagaggaaagaggaaataaacatcaaaattacaaagtctaggcggtggctcacgcctgtaatcccagcactttgggaggccaaggcgggcagatcacaaggtcaggaattcgagaccagcctggccaatatggtgaaaccccgtttccactaaaaatacaaaaattagccaggcatagtgatgtgtgcctgtaatccagccacttgggaggctgaggcaggagaatcactgaacccagggagacgaagattgcagtgagccaaaatcgtgccactgcacttcggcctgggtgacaaagcgagactccatctcaaaaaaaaaaaaattacaaactctttagatagaaattttggtgtttttttttgagacggagtctcactctgtcgcagaggctggagtgcagtgggactatgtcagctcaccgcaacctccatctcctggattcaagcaattctcctgtctcagcctcccaagtagctaggattacaggcgcccaccaccagacccagctagtttttatatttttagtagagatggtgtttcaccatgttggccaggctggtctcaaactcctgacctcaagtgatccacctgcttcagcctcccaaagtgctcagattacaggcgtgagccaccgcaccccacctagatagaaatttcaacatgaggccgggcacaatggctcacgcctgtaatctcagcacttcaggaggctgaggcgtgggaggatcacttgggcccaggagttcaggaccagcatgggtgacagagacagaccctgtctctatttatttgaaaaaaaaaaaaaaaaagagagagagaaagaaatttcaacatgaaaagtatctctcaaacccttcgagatgttggcaaaaagcgactcaaaggaaaatgtattactgtgtgtgaatttgcttgaaaataagaaagaggccgggtgtggtggctaacacctgtaatcccaacactctgggagtccgaatcaagtggatcatgaggtcaggagatcgagaccatcctggctaacatggtgaaaccctgtctctactaaaaatacaaaaaattagctaggcgcggtggctcatgcctgtaatcccagcactttgggaggctgaggcaggtggatcacctgaggtcaggggtttgagaccagcctggcctacatggtgaaacctcgtctcttctacaaatacaaaaattagctgggcgtggtggtgggtgcctgtaatcccagctactcagaggctgaggcaggagaatcgcttgaacccgggaggcggaggttgcggtgagccgagatcgcaccactacactccagcctgggcaacagcctgggtgacacagtgagactccatctcaaaaaatacaaaaaattagctgggtgtggtggcctgcgcctgtagtcccagctacccgggaggctgaggcaggagaatggagtgaacctgggaggaggagcttgcagtgagccgagatcccaccactgcactccagcctgggcgacagagcaagactcttgtctcaaaaaaaagaaaaaaaaaggaaaaaagaaccctgataataaagaaaccaaatgttcaactctcaaagctcggacactttaaagaaataattaataaaggcagaagttaaagggaggatgataaagcaattttttttgttggtttttttgagatggagtcttgctctgtcacccaggctggagtgcagtgatgcgatcttggctcactgcaacctctgcctcccgggttcaagcaattctcctgcctcagcctcctgagtagctggtactacaggtgcgcgccacctggcccagctaatttttgtatttttattagagacggggtttcaccatatttgttaggctggtctcaaactcctgatctcaggtaatctgcccacctcggcctctcaaagtgctgggattacaggcaggcgccaccgcgcctggcctaaagcaaaatattggttctgtgcaaaaggtcaataaaaagagcaaacgtttacaaactggagccagcacccattcagctcagtgtgtctggagaaaaaacaatctcgcttcagaattcatgattacgcagccctttttgcttcctaaaaatcctactatgttgctgttgaccattctctctctttctctctctcttgctttctctccagaaaagctattcagacattctcctctttcctcaaacctccaacacttcctcctccatccttagcctcagctgctgacctcacttctaatcattgagaaaccaggagaagcatttaagagtgaacctccgcctccccgcacgggcaaaaccacccacccacagaattgtgccccaattctgcgtcctctcctctcaccatggatggacggtccaggctccgagccaaagccaggcctcccctggagctctggatccaccacctgcagcttctcaggcagggccccagcagctcccctgctcccttgtaccatcaatccctcccctcactgggtcactcccaacaatatatatatttagtgatgtttctcccatgtggtaaaatcacttagcctctctcctcccccagctactatcctatttgtttctttccattctctgcaaaacttctcaaagcattgtgtctatgtgctgactccatttatcttctcccgttctctgctgagtccttcccacagactctcaccccagttactccatgaaatgacctctgcactgccacatccaatggtgaatgttcagttcttaattttattcagtctttcagcagcatttgacctggccgatcactccctcttcttaaaaatacttttctcagccaggcgtgatggctcacacctgtaatcccaacactttgggaggccaaggcgggaggatcatgagagcccaggagttcaagatcagcctgggcaacatggcaagaccctatctctacaaaaactaaaaagtagccagtgtgatggcatgcacctgtagtcccatctacttaggaggctgaggcagtaggatgacttgagcctgggaaatcaaggctgcagtgagccatgattgcaccactgcactccagcctgagtgacagcgagaccctgtctcaaaaagacaaaataggaaacttttctcagcatattcctctgattctcctgctgcttctgtctgcacagattcagtctcctttgccggttcttcctcatcctcctgatctcttgaccttgaagtgccccagagtacagtctttttttttttttttgagacgcagtctcgtctgtcacccaagctggagtgcaatggcgaggtctcagctcatgcaacctctgcctcctgggttcaagcgattctcctgcctcagcctcccaagtagccaggactacaggcacatgccaccatgcccagcaaattgttgtatttttagtagagacagggttttactatattggccacgctggtctcaaactcctgaactcgtgaaccacccgcctcggcctcccaaagtgctgagattacaggcatgagccaccacacccggcccagagtacagtctttagacggcctctctacctatacttgctcccctcataaactcctcctgcctcatggctttaaataccatcggtagactgatgactcccatatttctcttttttttttggagacggagtctcgctcagtcccccaggctggagtgcagtggcgcgatctcggctcactgcaagctccacctgccaagttcacaccattctcctacctcagcctctccagtagctgggactacaggcacccgccaccacgcctggctaatttttttgtatttttagtagagatggggtttcaccatgttagccaggatggtctcgatctcctgacctcgtgatccgcccatctcggcctcccaaagtgctgggattataggtgtgagccaccgtgcccagccgatgactcccatatttctatctcttgctgtgtgggagttctcctcagaactccatactcataaatccaactctcataaatagtatctcaaatgggcaatatgctcaaaagtcaattcctacttttctccctaaacttgctttcctgcagtctccaccatcttaatgtccaatctaacattaggaggcaaaaactttgaagtcattcttgactcttctctattacacaccctatccaatctttctgcagatccagtcgacccccaaatccagttagctctcatcatctcccctgttaccccctggtccaggccatcttcctctctcacctgaatcactgcagcattctcctcactggtctctttggttctgttttcactccaccttagcatagtctccacagagcagtcagagggatccttttaaagtgtaattcccatcctgtccctgctctgctcaaaaccctgtcgtgattcccgttttaatctgtcagattaaaagccagagtctttccagtgacctacatgatctgcctattatcacctcccacttctttccccttgctcactccactccagctctgcagctgtcctttctgtttcctgaacagcccagattttgcttctttagaacctttgtatttgctgtcccctctgtctggaatgtttttccaggaagtcacctggctctctcctgcacttccttcctgaccaccatgtttaaaaatcactcaaacacacttcaggccggacatggtggctcacgcctgtaatcccagcactttgggaggccaaggtgggtggatcacctgaggtcaggagttcgagaccagcctggccaacatggtgaaacttcgtctctactacaaatacaaatagtagccaggtgtagtggcacacacctgtaatctcagctactcaggaggctgaggcaggagaatcgcttgaacccagaaggcagaggaggtgcagtgagccaagatcacgccacaacaccccagcctgggtgacagagcaagaccccatctcaaaaaaaaaaaaagaaaaaaaaatcacacaaacacacttctcttcatattccttttccaagttttatttttctccagaatactttacattgttttaatggaagttctccgtttccccccaactagaatggatacttcctgcaggtaggcactctagtcctcccatccaagtactaaccaggctcaaccctgcttagcttctgagagcaggggagatcaggcctgttcagggtggtatggcccaggaattttgattctgttttattcattgctgttctgttgattctcttttgttcctcctcctagtgctgagaacactacttgtacataataagcattcaataaatatttgttgaatgaatgacttgttgaatgaattaatctcagaaatgcaggactggttctacattagaaaatttttcaaggtcattctctgttgtcgtaacacattaagagaggaaaattttgtactctaaatcatttgataaaatacatactgatttctgttttcaaaaactcttagtggctgggcgaggtggctcacatctataatcccagcattttgggaggacgaggtgggcggatcacttgaggtcaggagtttgagaccagcctggccatcatggtgaaaccctatctctactgaaaatagaaaaattagccgggtgtggtggcgcatgcctgtagtcccagctacctgggaggctgaggcaggagaatggcttgaacccgggaggcggaggttgcagtgagccaagatcatgccattgcactccagcctgggtaacagagtgagactccatctcaaaagaaaactcttagtgagtttaggaatccaaggaagaccctcaaactaaatagataatctagctaccagaagccttcagtaaaccttaacactccatggtgaaacattagaaacattcctactaaaagacaggctaagaatgcctgcaatcttcacggctagtccaagaagtcaaaaagaagaaatgagcgctgatttaaaaaaataaacaaacaaaaaactaccgatgcagaggctggcagcaaggactgaaggactgtacagtacttgcctggagcaggcggatggccacacccctgcgaagcctgctcagctggctgggggacgctccagtgtgtgagtggcaggatgcagggtacttcctctgccagggagttgcactggggagatcctcccccactcacactttggcagctggggctttggaatgtgacttagcttctgtcaaagggtcaatccaccctttgatatatgatgcaaaggcgaacatatgatgcaaaggtgagagaacagcccaaattaggacttttaccacagctgtggaggtggacagcgacagtggtgggccctggccagacttttcatgctcaaaggtggtggttgttcttcctacttcttgtccctccagggcttcctttgcctgtgtgctgaacctgcttcttttaattttttttaacttttttaaatttttaattgttttaattaaaacaaattttgaaaactgtctgaacctgcttttgaaccctgctatgatttgaatgtttgtcccctgccaaactgattttgaaacttaatctccaaagtggcaatattgagatggggctttaagcagtgactggatcatgagagctctgacctcatgagtggattaatggattaatgagttgtcatgggagtggcatcagtggctttataagaggaagaattaagacctgagctagcatggtcgccccttcaccatttgatatcttacactgcctaggggctctgcagagagtccccaccaacaagaaggctctcaccagatacagctcctcaaccttgtacttctcagcctctgtaactgtaagaaataaatgccttttctttatgaattacccagtttcagatattctgttataaacaatagaaaacgaactaaggcaaactctcatgattctactgccatgccattccaataaactccctttatgcttaagagagccagagttggccaggcgtggtgactcacgcctgtaattccagcactttgggaggccgaggcaggtggatcacaaggtcaggagatcgagaccatcctggctaacacggtgaaaccccgtctctactaaaaatacaaaaaaattagctgggcgtggtagtgggtgcctgtagtcccagctactcgggaggctgaagcaggaggagaatggcgtggacccaggaggcggagcttgcagtgagtcgagatcgtgccactgcactccagcctgggtgacagaatgagactccgtctcaaaaaaaaagagagccagagtttatttctgttgcttgcaaccaagaaatctggctggtgcactgaagtttccataaataatagcaatttaaagactctttccaagccaggcaatgcctagccttgtgtagtccttgtggtaatacattcattcattcatttgttcaaccaactgtgctccagagactaagaatacaaaaatgggggccgggtgtggtggctcacacctataatcctagcactttgggaggccgaggcaggtagatcacctgaggtcaggagttcgagaccaacctggccaaaatggtgaaacccctactctactaaaaatacaaaaaattagctgggggtggtggcggacacctgtaatcccagctactcgtgagactgaggcaggagaatcacttgaacccgggaggcagaggttgcagtgagccgagatcgcaccactgcactccagcctgggcaacaagagcgaaactccacctcgaaaaaaaaaaaaaaaaaaaaagagggccggggctgggcgcagtggctcacgcctgtaatcccagcactctgggaggccaaggcaggagaattacgaggtcagcagatcgagaccagcctgaccaacatggtgaaaccccatctctactaaaaatacaaaaattatccgggcgtggtggcgcacacctctagtcccagctacttgggaggctgaggcaggagaatcgcttgaacccgggaggcagaggttgcagtgagccgaaatcatgccactgcactccagcctgggtgacagagtgagactccgtctcaaaaaaaaaataaaaaaaaaaaaagaattcaaaaattgtagagttatagtgtgcttctagtttagttgagaggacatctgtccttcaaggaaggctagaatctataccctgagtccttactgaaatcaatccagcagtcaaaacatgggaccaacgatcacagcagtaagataggaagagcacctttgtacatttagctcatgttgagataagccactgacagagctgaaggaagctcacagttctgggttccatcctttggcatttaaaaagaaaagtgctaagaaaattcggttggtcacggtggctcacgcctgtaatcccaacactttgagaggccaaggcaggcagatcacgaggtcaggagttcgaaaccagcctggccaacatggtgaaaccccgtctctactaaaaacagaaaaattagccgggcatggtggcgcatgcctataatcccagctactcaggaggctgaggcaggagaattgcttgaacccgggagggggaggttgcagcgagtgagagcaggccactgcactccagcctgggagacagagcaagactctgtctcaaaaaaaaaaaagaaaaaaagaaagaaaggaaaaaaagaaagaaaaaaaaagaaaaaagaaaattcaggccaggccaggcctggtggctcacacctgtaatcccaacactttgggaggctgaagcgagacggtgccttagcccaggagtttgagaccagcctgagcaacatagcgagaccctgtctctataaaaaaaaatttttttttggccagacgcagtggctcacgcctgtaatcccagcactttgggaggccgaggcaggtggatcacgaggtcaggagatggagaccatcctggctaacacggtgaaaccccatctctactaaaaaatacaaaaaattaaccgggcgtggtggcgggcgcctgtagtcccagctactcgggaggctgaggcaggagaatggcgtgaacccgggaggcggagcttgcagtgagccgagattgcgccactgcactccagactgggagagagtgagactccgtctcaaaaaaaaaaaaaaaaaaaaaaaattaattgtcaggtgtgctggcatgcagctgtagtcctagctactcgggaggctgaggtaagaagatcgcttgagcccaggagttcaaggctgcagtaatagtgcctctcactctaccctgggtgacaatgagaccctctctcaaaaagaaagaaaaaagggaaagaagaaaagaaagaaagaaagagaagaaaggaaggaagaaagaaagaaaaagaaaaggaaggaaggaagaagaaaaaaaaagaaagaaagaaaagagagagaagttcaaagaccaaagggtcaggatcccaaaatagtttttatgttttatttatttatttacttatttatttttgagacagtatggctctgtcgcccaggctggagtgcagtgatgcgattgcggctcactgcagcctccaaactgggctcaggtggccctcccacctcagcctcccgagtagctgggaccacaggcgcgtgccaccatgcccagctaattttttaattctttgtagagatgaggtctctatatgctgcccaggctggtctcgagctcctgggcttaagccatccacccgcctgggcctcccaaagtgctgggattacagaagtgagccaccgcgcctaatcgggtggtttgtttgtttattgacggggtctcgctgctgcccaggctggagtgccagtggctgttcacaggtgcagtcctggagcattgcatcagctcttgggctctagcgatcctccagagtagctgcagctgggattccaggcgcgccaccgcgcggggctcagaatgggtttttatattgagggttatgctgccacctagaggatatatgtagtaccgaactgtgtgcgcagggaggctgaggttgcagtgagccaagatgatgccagggcactccagcgtgggtgacagagcaagatttcatctcaaaaaaaaaaaaaaaaaaaaaaaaaaaagaattgaaagtaaggtcttgaagagatatttgtgcctgtatggtcatagcagtattaactttgacccactagctaaaacacaaaagcaacatgtgtctgtcagcaggtgaacggataaacaaaatgtggtatatatgtacaattgaatattattcagcctttaaaaaggaataaaaggctggatgcgggggctcacgcctgtaatcctaacactttgggagactgaggtgggtggatcacccgaggttaggagtttgagaacagcctggccaacatggtgaaacttcatctctactaaaaatactaaaattagccgggcatggtggcacttgtctgtaatccaagctactggggaggctaaggcaggagaattgcttgaactcaggagccggaggttgcagtgagctaagatggcaccactgcactccagcctgggcaacagagtgagactccatctcaaaacaaacaaacaaaaaattattatttccaaagaaacaagaccctgggtccatttcccagcccacacctgatgttgactcacaacacacagcctggtttgctatgagcctgcttcatttaattgtcaccttaacttcacatcaccctcaagtcctggaataactctttgctgacctttgtgtgctgagccatctccatgtcgctcaacgtgcagtccctctcactgcactgagtcaatagccagacgtggtctgactgcagggtcatccttggtggcttaggctgactcgggcatagcagggtgctctgagacctcaccgcatataggctttgcccccaataaactctatataatattcatattatgtggtctgggtgtgtgtagctttgcactgtcttctcgtgacagtgccctcaacctctttcccaggatttcctcctctacctcctcaagtcccactgctctgcaaagaccaaaagctgcagagtcccagctccctcctttacaccccacgacgcagcctcctctctcagaaccctttaaacagagtcttttactgcagatcccaagaacagccacacccctctctcccacccactccagacacacccaggtaattatagcacccagggtaactatgtagatggagtccctggaacatgtggatagtgccccctgggagtatgcaaaagcaacattgctggcacctgcagagaacagggtgacatccaggaatcagagcatgggcctctgggaggtagggatgtggccaggcaggctgccaaaaattggtagagcaaggccacaggatctttctgaccttccttccaaacagaggctcctgtactggtgatccctgtgttgattgaccactcccttcctgggggtcgtggtctctgtcccagttgcccggacttctgtgagtgtcctactgaggtccttttcatgagaagcatgctgtccttccacctgctgggagcaagagtgacaacttcaatactataatagcagtggcatacagagaagaagaaagatgaagtggcaagaaaaacaggcttccaagcaggagtttttctataaaaacaaaaacgtttacaagcaaactttttataaagggctagatagtaaatattttaggctttgagagccacatagacttgtttgcagggactcaatgtcgctattgtagtttgaaagcagccatcagggttatgtaaatgagtgagtctgattttgtttcagcaaaattttatttaccaaaacagacaatgagtgggctggatttggcccatgatccttagtttgccaactcctgctttgggctcacccagatctgattttgaattctggctctgctactggttagctgcaggagcttggaaggctctctgagcctgtttcctcatctgtaaaattaaagcaataatttctaacactcaagagtgttacctcacgcctgtaatcccagcactttggaggctgaggcaggcggatcacctgaggtcagaagttcaagaccagcgtggccaacgtggcaaaaccctgtctctactaaaaaatacaaaaagtagccgggcatggtggcgcgcatctgtaatcccagctacttgggaggctgaggcagggatactgctagaacctgggaggtggagcgtgcagtgagtggagatcacacctccacactccagcctggccgacagagcgagactccatctcaaaaaaaaaaaaaaaaagagtgttagaaggttttgagataatgaataaaagatgccttgtgtatactaagtattcaacaactgatagctgcattggtctaattataacagtttagaagcgattgagtcaacaaatgctggatttgtcagggaggacttcctatcaggaggtagatcttgggctgagtcctgaagcaaagataggcattggatagaggagttgagagaacaccctaggactgttattattattattcgacacggagtctcttgctctgtcacccaggctggagtgcagtggcgcgatctcggctcactgcaacctctgcctcccaggttcaagcgattctcctgcctcctaagtagctgagactacaggtgtgtgccaccacacccggctaatttttatatttttagtagagacagagtttcaccatgttggccatgctggtctcgaactcctgacttcaggtgatccacccgcctcagcctcccaaagtgctggaataacagatgtgagccaccgcacccagcccagaaccatttttcaatccttggctctgccttttattagctgcaagatctcaggcaatttatttaacctctccaaagactcattttctcattcacaaaatgaggcaaataataatatctactatcccaggttgtcatgagaattaaatgcaacatgacatttaatgaaatgagaagtcccttggacattaactggctaaagtatgtgctcgacaaggatatcattttaggtggatacttagcatctcagaactgatgctcacaatggaatatcattgaaacgcattaaaattcattttaaatgattgtaggtagtgaggcaattgaaagaagaagacaagaggactgattataatgcttcaggctcactagtctccttttaggagggaaaaacaatttcaagttaaattttaggctctagatttttacccctgctgctcattagaatcacccagattgatgaaatcagagcccatctgaggctgtgtttttcatctccagaatgagagctgttgtggggattaagtttttgaaaaagtacatctaacaggtgatcgaaaatgatagtgatattattgcagtgatggtcattattgttgttattattatactgaaagaggcttcagttttctgatccataaagtgagggaattgcatgagaccattgctaagattccttctagctctgtttttttgtttttgttttttagacagagtctctgtcgcccaggctggagtgcaatggcatgatcttggctcactgcaacctccgcctcccgggttcaaatgatcctcctgtctcagcctccgaagtagctgggactacaggcacacaccaccatgcccagctaacttttatatttttaatagaggtggggtttcaccatattggtcaggctggtctcaaactcctgacctcaggtgatccacccgcctcggcctcccaacatgctgggattacaggcatgagccactgtgcccaaccccttctagctttcttgatcactgattctagggttctctgctgaaatatatttgagacatcctggataaaagatcatgcaagagctcccaatatggtattaataattgattctggaggcttagctactcctgatggattagacatgactcaactgcctctcttatgtgtacaacacaacaacacaaccaagaaaggttattctggcattccatttattcagtttatttacagcccttacttccagcagcacgttaaagatatggccagggccgggtgcagtggctcaagtctgtaatcccaggactttgggaggccaaggtgggcggatcacaaggtcaggagtttgagaatctggcaattcttcagacttagaagcaaccagctcgataacacagtcttgtgtgggctctccctctgtccctccctcgcttccctcatttctcatccctgcccctgagactgtgcaccttcacatagccctgccatgagaccttcatctcaggctttgctttctggggtaactgaggctaaacactgagtggccctaaaagaggattgggatttggaagttagattattcaccagagaacagactttgctgatgatcaggcccaggttgtaattgttgaaaaaaagagaggatgcatagtcttatctcatctcctagtcaaagtcaacaccatgataaataagagtcaaatcctgagatgtgaattggggacatttgagtggttaaccctgagaagcttgcaccttcagacccctcaatacccctgctccccagagaaggctggacattgacctcagcacaggcaggagccctgcaagatgccatttgtcctactaaagatggacccctccactctgtttctaggtaaataaccaaagtcaagtctccacacagcctgagcaagaaagtcagagcctgctacaggagaaaataccacactggccaaaggattcactagccctggccactgtgtgtgggaggaaccagggaatcatgtgtgggagtcaatgttgaagctgttggactgggggtggggtggaatataagcctggccctggggagtttttcccgtttgagggcctttacccacaactcaagatccagtgctatagcaggagatcccagagctagtcctaacagatggtcaggattgaacttggcctagagtaaaatgaggaggatagtgccagaactttctcaacatactattgaggaagaggtcagaaggcttaaggaggtagtgtaactggaaaggggtcctgatccagaccccaggagagggttcttggaccttgcataagaaagagttcgagacgagtccacccagtaaagtgaaagcaattttattaaagaagaaacagaaaaatggctactccatagagcagcgacatgggctgcttaactgagtgttcttatgattatttcttgattctatgctaaacaaagggtggattatttgtgaggtttccaggaaaggggcagggatttcccagaactgatggatccccccacttttagaccatatagagtaacttcctgacgttgccatggcgtttgtaaactgtcatggccctggagggaatgtcttttagcatgttaatgtattataatgtgtataatgagcagtgaggacggccagaggtcgctttcatcaccatcttggttttggtgggttttggccggcttctttatcacatcctgttttatgagcagggtctttatgacctataacttctcctgccgacctcctatctcctcctgtgactaagaatgcagcctagcaggtctcagcctcattttaccatggagtcgctctgattccaatgcctctgacagcaggaatgttggaattgaattactatgcaagacctgagaagccattggaggacacagccttcattaggacactggcatctgtgacaggctgggtggtggtaattgtctgttggccagtgtggactgtgggagatgctactactgtaagatatgacaaggtttctcttcaaacaggctgatccgcttcttattctctaattccaagtaccaccccccgcctttcttctccttttccttctttctgattttactacatgcccaggcatgctacggccccagctcacattcctttccttatttaaaaatggactggggctgggcgcggtggctcatgcctgtaatcccagcactttgggaggccgaggcgggcggatcatgaggtcaggagatcgagaccatcctggctaacacggtgaaaccccgtctctactaaaaatgcaaaaacattagccaggcgtggttgcaggtgcctgcagtcccagcggctcaggaggctgaggcaggagaatggcgtgaacctgggaggtggaggttgcaatgagccgagattgtgccactgcactccagcctgggtgacagagcgagactccgtctcaaaaaaaaaaaaaaaaaaaaaaatagctgggcatggtggcgcgtgcctgtaataccagctactctggaggctgaggcaagagaatcgcttgaacccagtaggcggaagttgcagtgagccgagatcttgacactgcactccagcctggtgacagagtgagactctgtctcaaaaaaaaaaaaaagaaaaaaaaagacagaaagaaagagcacagacagagtcacaggtatttgcagtaggaagctgtcaggttagagtgcacggaaatagaaagtatattttacacttacagcacatcttcgtttgattagccacatttaaaatactgaatagcaacgtgtggctatttagtattcactaaaatcttggacagtgcaagtctaaagaatccttgatccgtccggcatggtggctcacgcctttaatcccagcactttgggaggccaaggtggaaggatcacttaaggtcaggagttcgagaccagcctggccaacatggtgaaacctcgtctctactaataatacaaaaaaaattagccgggcatggtggtgcatgcctgtaatcccaggtacttgggaggctgaggcaggagaatagcttgaatccaggaggcgctgcagtgagccgagatcatgccatgccactactgcactccagcctgggcaacagagtgagactgtctcaaaaaaaaaaaaaaaattgttgggcgtggtggctcacgcctgtaatcccagcactttgggaggctgaggggggtggatcacctgggttctggagttcgagaccagcctggccaacatggtgaaaccccatctctactaaaaatacaaaaattagctgggcgtggtggtgggcacctgaaatctcagctactcaggaggctgaggcaggagaatttcttgaacccaggaggcagaggttgcagtgagccaagatcgcgcctctgcactccatcctgggtggcagagcaagactatgtctcaaaaaaaaaaaaaaaaatacttgattgtctggacattctgcagaacatcatatggagacactatgttgacgacatcatgctgattgtaagcaagaaatggcaagtgttccagaaacacagtcaagacacatacatgccagaaggtgagatataaactctactaagattcagtggcctgccacactggtgacatttttaaacctgctagatgtttgtgtagaaaaggatttaaccttgcccaaagaggggtctggcctttgtccccagctactggacataatctctttaaactcttgaaatatcattcctgatagaagtatttttgttttgactaggggccttgggccagccagatagcaacaatgtgatctgggttgggggctttggatcaggtggcatcagtgtgacctcctgagtggctagagactagaatcaaccacatgggcagacaacccagcttacatgatggaattccaataaagactttggacacaagggcttgggtaagctttcctggttggcaatgctctatactgggaaacccattctgactccatagggagaggacaactggatattctcatttggtacctccctgggctttgccctatgcatttttcccttgtctgattattattattattatgagatggaatctcgctctgtcacccaggctggagtgcagtggaatgatctcaactcactgcaacctctgcctccccggttcaagcgattttcctgtctcggcctcccgagtagctgggactacagatgcataccaccacacccggctaatttttttgtatttttagtagagacggggtttcacgttagccaggatggtctcgatctcctgacctcatgttccgcctgcctcggcctctcaaagtgctaggaatacatgtgtgagccaccgcgcccagcccccttggctgattattaaagtgtatccttgagctgtagtaaattataaccgtgaatataacagcttttagtgagttttgtgagcacttctagcaaattatcaaacctaaggatagccttggggacccctgaacttgcagttggtgtcagaaataagggtgctcatgtgtgtaccatgccctctaattttgtagttaattaactttcacaactttattattaccgcttacactcaatgtttattcacatttatccacataccacttattctagtgccttgcatcaaagactttctatctcatgtactttattctgcttgaagtaaatcctttaggatattcttttttttttttaaactttgcacatacatacttttattttttatttatttttaattttgttatttttgtgggtacgtagtagatatatgtatttatggagtacatgagatgttttgatacaggcatgcaatgtgaaataagcacatcatggagaatggggtatccatcctctcaagcaatttatccttcaagttacaaacaatccaattacactctttaagttattttaaaatgtacatttaattttgtattgactagagtcactctgttgtgctatcaaatataattttttttttttttgagacagagtctcactcagtggcccagactgaaagtgcagtggcacaagctcggctcacttcaatctctgcctccctggttcaagcgaatctcctgcctcagcctcccacatagctgggattacaggcacacaccaccatgcccagctaatttttatatttttttagtagagacgggttttcgccatgttggccaggctggtcttgaactcctggcctcaaatgatctgaccacctcagcctcccaaagtgctaggattacaggcatgagccaccacacctggccaaaatagaatattctttagtgaggtctgctggtgacaatttttttcttttttttgagactgagtctcgctgttgtcagcttgggctggagtgcaatagcacgatctcagctcactgcaacctccacctcccggattccagcaattctcctgcctcagcctcccaagtagctgagagattacaggcacccaccaccacacgcggctaatttttgtatttttagtagaaatgggggttcaccgtgttggccaggctggtctcgaactcctgacctcaggtgatccacccaccttggcctcccaaagtgctgggattacaagcatgagccaccacgcacagccaattttttccgtttttgtctgaaatcttattttgtgtcatctttgaaatatatttttgatggatataaaattgttggttgatagttattatcattattattattattttgagacagggtctcactctgttgcctatgctggggtgtagtaatgtgatctcggttcactgcagacttgacctcctagggctcaggtgatcttcccacctcagcctccctagtagctgggactacagatgcatgccaccatacccaactaatttttctattttttgtagagatgaggctttgccacatttcccaggctggtctctaactcctgagctctagcaatccacccaccttggccttacaaagtgctgggccatgactagccagcagttactttttatagcatattgaatatttaatatgaatcttctggcatccactgtaactgtttaaaaaatcagctgtttacttggcactcttttttttttttttttttttgagacagagtcttgccctgtcgcccaggctggagtgcagtggcgtgatcttggctcactgcaagctctgcctcccgggttcacgccattctcctgcctcagcctccggagtagctgggactaaaggcgcccgccaccacgcccggctgatttttttgtatttttcgtagagttggggtttcaccgtgttagccaggatggtctcgatctcctgacctcgtgatctgtccgcctcggcctcccaaagtgctgggattataggcgtgagccaccgcgcccagcctcttttttttttttttttagacggagtcttactctgtcatctaggctggtgtacagtggcgtgatctcagctcagtgcaacctccacctcctgcctcagcctgccaaatagctgggattacaggtgcgtaccatcacgcccggctaatttttgtattttcagtagagatggggtttcaccatgttagacaggctggtctcgaactcctggcctcaagtgatctgcctgccccagcctcccaaagattacaggcatgagccaccgcacccggccaagtagcactcctttgaaggtaatctgcttcccctacccctagcaatttttaacaatttttcttcatttttatttcctgaagttttgttattaataatctgtgtgcagatttctttgtatttcttttgtttgcagttcatagtgattcttgaattagtgtgttggtttctgttatcaccacaggaaaattgtcagccgttagcttttcaaatatttccttgctaaattctctcttctcccctttcggtacaattgatttgattaaaactaaaaccagggccgggtgcagtgactcatgcctgtaatcccaacactttgagaggctgaggcaggtggatcacctaagctcaggagttcaagaccagcctggccaatatggtgaaaccccgtctctactaaaaatacaaaaattaccaggcatggtggcacacatttgtagtcaggaggctgaggcaggagaattgcttgaatccaggaggtggaggttgcagtgagctgagatcccaccactgcagtctggcctgggcgacagagtgagatgagaatctgtctcgaaaaaaaaagttatgaatgtttgataaactatatttgttagaatgtttgttgtagaatactattcattgatttttaaacaatgttagattaaaccattcactggatttgtgataattaacttactgattttacctcactgatttgttgtaattaatacaactggtataaaaagactgtgacgaggccgggcatggtggctcccgcctataatcccagcactttgggaggctgaggcaggcggatcacctgaggtcaggagttcaagaccagcctgaccaacatggtgaaaccccatctttactaaaaatacaaaattagccggtcgtggtggtgcatgcctgtaatcccagctcttcgggaggctgtggcaggagaatcacttgaacccgggaggtggaggttgcagtgagccgatatcgcgccattgcactccagcctgggcaacaagagcgaaactccgtctaaaaaaaaaaaagaaaaaaaacacataaaacaaaacaacactgtgacggttcccaaaaattaggagcataattaaaggaactcctgataaaaattaattttatcttacatgtaaactaaaatgactttatgaagttaattcagaaatacaatgcagggtattagtttgccacagctgcgtattcagcctaatgtaatattcttgttatttttaaattcttcttttaactttactcatatgtggatcatcaaatttcaaaagattaaatgacaatactcttagcagcaagcttccctaagcatataaacattttaatgggtgatgattcagaaggtacccgaagaatatgtactgccagatatcattcacccccatatacctgcccgacagacatcccattttgggaccctggataaatgtgtgggtggagagaaagataggagaaagtggtataagcaaatggctttggagtctgattgacagcgattgaaatcctgtctctacctcttaacagcctcatgatcctacataagttaccccgatcctcagggccacatctgtaaattgggggttgcgatggcagccatctcacagggtctcttttcggggaagggcaggaattatggattaagtgagctagtaattgtaaagcacttaatacaaggagggcgcataataagtacttcataaataatgacggccattatcatgactgaggtgtatgcagctgtcggggattacggcgacttcagaatttctggtgggcagggctcaaaggcagcaaatcacactggaagtcgaggtgaggcactgcttctgcacagactgcttagctggagagaatgaggaaggcttagaggagatttagaggaacttagagtcctccgcctccaactctgtgggatctgctcccgtgccagagacattcaggggatttctcgcactctcccctcccctacgtccctcccgccccatccaactaaccacacaacacatacaaaatagcccctgcgaggttctgcacgctggaagggaacaggagaagggcgctgcgctttcttgctgatgccctgtacttgggcccctggtagacacagccacttgtcccctcagcctgcagagaaatcccacgtagaccgcgcccgggtccttggcttcagccaatctccctttggtgggggtgggatgcacgatccaaggttttattggctacagacagcggggtgtggtccgccaagaacacagattggctcccgagggcatctcggatccctggtggggcgccgctcagcctcccggtgcaggcccggccgaggccaggaggaagcggccagaccgcgtccattcggcgccagctcactccggacgtccggagcctctgccagcgctgcttccgtccagtgcgcctggacgcgctgtccttaactggagaaaggcttcaccttgaaatccaggcttcatccctagttagcgtgtgaccttgagcagttgactttatttttcagtgcctagttttccagataccaggactgactccaaggactattactcatctggagggtttagcacagtaccgtcgcatagtaaatttccatgtcagttttggttacctttcatgcacttgcaaacatgccatgctctgaaacgaaataggcacatcttttttttttttttttttaaggagtcttcctctcgcccaggctggagtgcagtggcgcgatcttggctcactgcaacctccacctcccgtgttcgagattctcctgcctcagcctcctgattagctgggactacaggcatgccacgacgcccagttaatttttgtatttttagtagagacggggtttcgccatcttggccaggctggtctaactcctgacctcaggtgatctgactgcctcagcctctcaaagtgttgggattacaggcataagccactgcatctggccagaaatgaaataagtaaatcttttaacctgctctaacaatatagtgaaaagaccatattattattagagcaggttaagggatttgcctatttcgggttctagttatagtcttaaacttggacattcttgtagaaagtaaaaagtttcctcttcaaagttccccttcttgttaaagaatacatcataagtgttagaagtaatagtttattttaaagactaactttcttcaagcctccttgctttgtgctaataactctttgttaagccctatcctatgtaactgttggacatgctcacaggcacgttccagttcacagcctatgccccttccttatttggaaatgttattgcttccttaaacctttcggtaagcaacttcctctccttcttcgttcttccttgcacttacctatttagaaagttttaggctattagcaaatcggctatcagtttaagagtgtgaggtcccgctccagccaatggatgcaggacatagcagtgaggacgacccaaatgcgtaagggataaatatgtttgcttttcctttgttcaggtgtgctctcgacatcgttccatctgcgattgagcaccctttctgcagaaagtaaagattgccttgctggagatcttttgtctccgtgctgacttttcttcgtggcaccgattatctatttctaacaattttggtatttctaacattctgaacaatcttgggctagttgtctcttctgggcctgtttccccatccgtcacatgataaacttcattggtttaaaaaccccagcgaacatttattgagttactattaccttcctgccctccccaaccccaaccccagggagcagttacaacctcagccgctgagcgcactcgccgggtgttaagaagcaccaaagacagggaggcttgattgattttgctttgggagtagagggtcagaagattcacaggaaaatggcatttgagcaaggatgattcactggagctagcttttaaatactggcgaggcttttatgttgcagtcccttacaaagttgagcattcgcagggactgcactccgaaataagcccgcttccccttttcattcgctaatgatccagggagctgctggttccgcatgcggcaggttgtgccttttcctaatcagggttctgcatcgcctcgaacccgcaggccgtggcgggttctcctgaggaagcagggactggggtgcagggtgaagctgctcgtgccggccagcgcctgtgagcaaaactcaaacggaggagcaggaggggtcgagctggagcgtggcagggttgaccctgccttttagaagggcacaatttgaagggtacccaggggccggaagccggggacctaaggcccgccccgttccagctgctgggagggctcccgccccagggagttagttttgcagagactgggtctgcagcgctccaccgggggccggcgacagacgccacaaaacagctgcaggaacggtggctcgctccaggcacccagggcccgggaaagaggcgcgggtagcacgcgcgggtcacgtgggcgatgcgggcgtgcgcccctgcacccgcgggagggggatggggaaaaggggcggggccggcgcttgacctcccgtgaagcctagcgcggggaaggaccggaactccgggcgggcggcttgttgataatatggcggctggagctgcctgggcatcccgaggaggcggtggggcccactcccggaagaagggtcccttttcgcgctagtgcagcggcccctctggacccggaagtccgggccggttgctgaatgaggggagccgggccctccccgcgccagtccccccgcaccctccgtcccgacccgggccccgccatgtccttcttccggcggaaaggtagctgagggggcgccggcggggagtcaggccgggcctcaggggcggcggtggggcaggtgggcctgcgagggctttccccaaggcggcagcaaggccttcagcgagcctcgacctcggcgcagatgccccctgagtgccttgctctgctccgggactcttctgggagggagaaggtggccttcttgcgcgaggtcagaggagtattgtcgcgctggttcagaagcgattgctaaagcccatagaagttcctgcctgtttggttaagaacagttcttaggtgggggttagtttttttgtgtttctttgaggaccgtggatcaagatcaaggaaatctctttagaaccttattatggaagtctgaagtttccaaatgttgagggttttatgtctaaaagcaacacgtgaaaaaattgttttcttcacccagtgctgtcttccaatttcctctttggggggaggggtagttactgctgttactaaaataaaattacttattgctaaagttccccaacaggaagaccactacttttgatgactttggcaagtttgctaactactggaaccctaacttacaaacgaactacttacatttttgatttccagttgtattacctgcccaatgtttacgtagaaacagcttaattttgattctgggtaacgttgttgcacttcattaaaaatacatatccgaagtgagcaagtatgggtctgtggacagcagtgatttttcctgtcaattcctgttgcttcagataaaatgtaccagacagaggccgggcgcggtggctcacgcctgtaatcccagcactttgggaggcttggcgggtggatcacctgagatcgggagttcaagaccagcctgaccaacatggagaaaccccgtgtctactaaaaatacaaaattagccagggtggtggcgcatgcctgtaatgccagctacttgggaggctgaagcaggagaatcgcttgaacctgggaggcggaggttgcggtgagccgagatagcaccattgcactccagcctgggcaaaaagagcgaaactccgtctcaaaaaaaaagtaccagacagaaatgggttttgttttctttttttgttttgagacggagtttcgctcttgttgcccaggctcgagtgcaatggcgcgatctcagtctcggctcactgcaacctctgtctcccaggtttaatcgattctcctgcctcagcctcccaagtagctgggattacccatgccccaccatgcccggctaatttttgtatttttagtagaaacggggcttcaccatgttaggctggtcttgaacccctgacctcaagtgggcctcccacctcggcctcccaaagtgccaggattacaggcatgagccaccgcggccagccagaaatgggttttggaaaaagcactaaacaaaatcgaacttggtttcatatgacagctctgctgctaactgtaacaggggcagaccagttaacctacttttctgtcttctgtcagctgagaattagatgattcccaaaggcccattgaactctgaatgactttaaatacttcttcttaagtgggtacacggttttggtaactgatgccaggtgatgaatgcatgaaagtgcttaatgaatgaaaccggtaaaatagtaggaggaagctttattggtaaggcaggggtatacctaatagctctctaatttattggtattgaagtggttaacttttgtttttttaaggggggaaaacattctaagaataatgaggcaaactgcatattgcacaagagactgttgtctctattcaacaaataccttttgagtgtccagagtctgccaggtgctgtgctaggccctcacgattgagtagtgaaccagagaatgtccctgcacccatggagcttattgtctactggggtagacagataataaataagcaaacaaatcttctctcttctccctttcgctccatgtaagtgtgtgtgtataggtgtatacttacaagttgagtaaagtgttatgaaagattaagaggagaaatgcattttggttagatgttagaggactcagcaggtgaccttgaaacttagagctgaaggatcagtaggaggtaactagagaggccagggaatcgcatgttcaaaggccaggaggcaagaaagagcatggtgcccttcaagagaggaaagaaggctactgtgactggagcatagatgtaggcaagtgttgggtgattgagagctctacgggccatggttaggttttattcctaatgccgagatgccaaacatggtggttcatatctgtaatcccagtattttaggaggccgaggcaggaatatagcttgaacccaggagttcaagaccagcctgagcaacatgagacctgtacaaaacatttaaaaaattgctgggtatgatggtgcacacctgtggtcccagctactcaggaggctgaggcagaaggatcacttgagcctaggaggtggaggctacaatgagccatatttgagtcactacactccagcctggatgacaaagtgagaccatgtgtcaaacaaaatacagaaagaatattaatttaaaattttgaaagaggagtgatctgaacttatatcttaaaaagatcattctagggcatggtggctcatgcctgtaatcaagggctttgggaggctgagacaggaggatcacctgaggccagttcgagatcaacctgtacagcatagagagactccatctctacaaaaagaaaaaataaatagctgggtgttgtgagttattcaggaggctgaagcagaaagatcacttgagcccaggagtttgaggctgcagtaagctatgatcccaccactgcaacacagtgagatcttgtctcaaaaaaaaaaaaaaatcattctaggtgctttttggaggctggatgtggtaagagtagaagctggagatggtcctgttagggattcgattcagactttaaataccatcaatgcattgagtcccaaatttacatcactacgttggatccttgcccctgaatccagactggtatatccaactttaggttcagtttgtatctctacctgaccaatatagaggtgtccagtcttttggcttccctaggccacattggaagaagaattgtcttgagccacacatagagtacactaacgctaacaatagcagatgagctaaaaaaaaatcgcaaaacttataatgttttaagaaagtttacgaatttgtgttgggcacattcagagccatcctgggccgcgggatggacaagcttaatccagtagataccttcaacttacaatatctaaaattttatgccagatttagtcattttaaacctgctcatcagtttttctcaagaagtagtattttggctttttttcttttcttttttttgagatggagtttcgctcttatcgttcaagctggagtgcagtggcggatcttggctcactgcaacctccgcctcctgggttcaagtgattctcctgcctcagcctcgcaagtagctggaattacaggcatgcgccaccatgaccagctaatttttggagacagggtttcaccatgttggtcaggctggttttgtactcctgacctcaggtgatctgcctgcctcggcctcccaaaggctgggattacaggcatgagccaccgctcccggctgcatttttggatttttagttgctcagcccaaaactttagtacatctttgaacctcttctttcctcctactctatatctgatccatcagcaaatctgttaggtctacctcacacatatcgaaatcctaccacgtctcaccatctgtgacaattaacaccctggtctaggcagtcatctctgttaagattgagtggttaaggatgtcctctaaggagatgacattcaaatcttagcttaaatgtcaagagggagctggttttataaagattgaggaggcagcattattttgccataggcttccatttggtttccattccattcttgatacttatggtatatattcaaaacaaatgcacagaaacagacccaggtatattgggaatttcggatatagagttcctagttgggaaaagatagactgatctgtaaatgatgctagttatccatcatctggcaaaaaataatttcctgcctcctctcatatatctcagatcaacagactttttctgttaagggccaaatcataaatattttaggctttccagaccatatggtttctgtcacactctcctttatccttgaagccatagacaatatgtaaacaaatgggcatggctgtgctacgataaaactttacttacaaaaactggtagtgggccagtttaggcatggccagcactttgggaggctaaggcagatggatcacttggggtcaggagtttgagaccagcctggccaacatggtgaaaccctgtctctactaaaaatacaaaaaatagctgggcatggtggtgggtgtctataattccagctactctggaggctaagacacaagaatcacttgaacccaggaggcagaggttgcagtgagctgagatagcaccactgcactccagccagggtgacggagtcttaaagcaaaacaaaacaaaaggtagtgggttgtatttggcccatgggctgtagtttgccaatccctgatgcagaaacaaattccaggtaaataagagcctggaatgttaaaaaaacaaaacttgaagtcatgtagaagaacaggtagggggaacaatcctgatctcaggataggaagggatattgcttaaaataagacacaggaaaatataatccatgttgtgtaaatttgactacgttaaaacttaaaactttcgccaagcgcggtggctcacgcctgtaataccagtactttgggaggccgaggtgagcagatcaccaggtcaggagattgagaccatcctggctaacacggtgaaaccccgtctctactaaaaatacaaaacattagccgggcgtggtggcgggcgcctgtagtcccagctacttgggaggctgaggcaggagaatggcctgaacccgggaggcgaagcttgcagtgagctgagatcgcgccactgcactccagcctgggcgacagagtgagattccgtctcaaaaaaacaaaacaaaacaaagcaaaaaacctaaaactttcatacaataaagtatacctaagatacttctagaagagaagatttacatccaggacgtgtatggaatttctgcaagtaataagtaaaagacaagggacatgaagaggcagttcacaaaagaggaagccaaaatgaccaataaacatgaaaggatgtttaacctcaaaggaaacaaggaaatgaattaaaaacatcaaatgccatttcaaaactagtaagttggcaaaattaaaaataccaaggatgagaatatgaagcatggctatatgagtgcatggaatggtacagtcactttcattaaaaatgcacataatttgttttttatttatttttttgagacagtctatgtcgcccaggctagaatgcagtggcatgatctcggctcaccacaatctctgcctcctgggttcaagcaattctcctgcctcagcctcctgagtagctgggattacaggcacatgccacaacgcccggttaagttttgtatttttagtagagacagggttttgccatgttggccaggctggtctcgaactcctgacctcaggtgagctgcttcccaaagtgctgggattagaggcgtgagccaatgctcctggctgaaaaaaatgcacataatttgttacctagcaattccatgtctagaggcttatcctagagaaattcttgcttatatgcataggaagacgtgtactagaatgttcactagttgaatgtttaagtgaaaattaggaaataaagtaaatgttcattaacaggaaaatgagtaaaggtatatttataaaacaattaagtagctaaaatgaataaactagagctgcgtgaatgaactagaactggttcaatagtcatgtcagattattgaatgaatacaggtcagatatgtatagagtgtcatttgtgtaattaattttttttttttttttgagatggagtctcactctgttgcccaggctggagtgcagtggcgtgatctcagctcactgcaacctccacctcctgggttaaagtgattctcctgcctcagcctcccgagtagttgggattacaggcatgcaccaccatgcccagctcattttcctatttttagtggccacagggtttcaccatgttggccaggctggtcttgaactcctgacctcaagtgttccacccaacttggcctcccaaagtgctaggattacaggcgtgagccaccgtgctcagccatttgcgtgatttttaaagatgtgcagaataatgccattaaaaaaaatacacatacatgtatatatatacacgtttggctgggtgtggtggctcacacctgtaatcccagcactttgggaggctgaggcaggaggatcacttgagcccaggtgtacaagactagcctgggcgagatagcaagaccccatctcaacaacagaaaggataattaggtatggtggcatgagaggatcacttgagcccaggagttcgagtgttatcaggccactgcactctagcctggacaacaaagcaagaccgtgtctcaaaaaaataaaaataaaaagtatttgtatgtggtcatagtcaaaaaacgtacatggaaggaaaatgtctttatttatttatttatttttttttttttaagacagagtcttgctctgtcacccaggctggggtacagtggtgtaatctcagctcaccgcaatctcggcctcccgggttcaagcgattcttctgcctcagccttctaagtagctgggactacaggtacccgccaccacaccctgctaattcttgtgttttcagtagagacagggtttcaccatgttggcaaggctggtctcgaactcctgaccttaagtgagccacccgccttggcctcccaaagtcctgggattacaggtgtgagccactgcgcttggccaggaaatatctaatttagtaagtatttatatctgggaaaggaagggtcaggtggtgattcataggaactctaaagtctatgtataatacttagggggacagaaggaaataaagcaaaatgctgatatttgattgttgagttgtgtatatgttagaagtataacataggagatctgattgatagtaggagaatgtttttaggtggtaaaagtggaaccgtggtggtttgttttggcagtagaatcagttggtcatagtttgtatgtggaaggtaataaacagaccatgttaaggatgacttccggaattttggtctgagtagtgggtggatgacagtgtcattcatgagggaagatgaagactgaggtaggaacaggtttgggagaagatgacatgttcccttttagacaagtggaattatggaagatggcaggtaggtggttagctatatgaatttgagataaaagatttaggatggagatataaatttaggagtaacagcgtatctatggtattgtaagccttaagaatgggtaggatcagccaggaaatacagatgtatatgcagaagagaggagtcaaggaagccaagacaagttaatgtttaaagtgagtgatgtagtccatgggcagatgctgctgagagggctgcaaacaccagtgaccctacaacatttttaaatgtcgtcttcctgacagcagtgatcagtacctgcaacgatcttatttatttttttcatgttagtctccacacacttgaatgtagactttttgaaggcaaaatcattgccttttctgagctgggagcatgtctggcacataccaagcactcaacagttgatgtattgacttcatccagatactctgagggcgagttatttcctgctactagcctttcacctttcaatgtttaagagcacaaatacagagatgggcacgttttggcatttcttattttgataaccttttcctggtaagattttttaatgttgaaaaaaaaaaacaagaaaagagggttaaaaatagtcttatgtcagatcctgtgatagaattcacacttggcttaagctgctgggcaccttcctatcttggatgtcatattagcttatctacagcagaatttttactgttttatgtagtaaggaagcaattatatgattattttacagacaaattattctttatcttttatttttttagacggagtctctctttgtctcccaggctggagtacagtgtcgcgatctcggctcactgcaacctccgcctcctgggttcaagcaattctctgcctcagcctcccaagtagctgggcttacaggtgtccgccaccacacccagctcattgttttgtatttttagtagagatggggtttcaccatgttggccaggctggtcttgagctactgacctcaggtgatccacccgccttggcatcccaaagtgctggaattacaggcgtgagccaccgtgcctggcccagacaaattattatactctgagtgttagaggcttaggatgttttcacttgatgctatgggaggaataagtaataagatatgatacacaaccaaagacctttcttcactatgcttctagtagctagtactatggatgacacatggtaataatattggttagcatttgtcctcaatttactgtgctagttactcttctaagccccttacaggtatatattttttttcatcaataatcctctaaggtagtttttattattgacctaattttataaatcaagaaaattaagacccagagaagtaagtaacttgtccaagatcacatggcttataagtggtagagccagaatttgaccccagatgttgtgactacattgtctctccataagcaggttcaactcttttgactggatgctgttccaaggtcacttccttagagaagcctttgctgacaactaccctcctgtgccctcctccaaggctgtccattgttctagaactttgaatactcatcttagaataaagctggtctaatttttacagtgttatagaatggatctctgactgcaaaagttggtcataattatctttttatgttctagtgaaaggcaaagaacaagagaagacctcagatgtgaagtccattaaaggtaagttctgcccttggcagtccactgcattaaaaagtgatgtgctttgcatttgtgagttctttaatcctgttatactctctcttttggcattaatcatttctgccttattttataattacttatgattttgatttatttccctctttaacctgtataatgctttaacatctagcatataataagtaggctttttttttttttttttttttggagacggagtcttgctctgttacccaggctggagtgcagtggcgcgatcttggctcactgcaagctctgtctcccgggttcacaccattctcctgcctcagcctccccagcagctgggactacaggtgcacggcgccacgcctggctaattttttgtattttttagtagagacagagtttcaccatgttagccagtatggtctcgatctcctgaccttgtgatccgcccgcctcggcctcccaaagtgctgggattacaagcgtgagccaccgcacccggccgtaagtaggctttttttaccttaattttatttttttgagatggagtcttgctcttatccccaggctggagtgcagtggtgccatctcggctcactgcagcatccacctcccgggttcaagcgattctcctgcctcagcctcccgagtagctgggattacaggtggccgccaccatgcccagctaatttttgtatttttagtagagacagggtttcaccgtgttggccaggccagtctcaaactcctgacctcaagtgatccactcgccttggcctcccaaagtcctgggattacaggcgtgagccaccatgcctggccataagtaggcttttactgagccttgtgtgtattggctatcctagtgattacagtgaaccagtgcccttcttattaatcacacatttaattgttccctaaaagtgattagttcactttatttatttagtaagacaaaaaatgaagaatactcttaactgagcagtctgttaactgtaggaaagcactgacacttataaggcttagttttctgtcatttatccagaagtatggttgattacagtttttacttttttatttgaatgaacaaccttaatttaaaatatattttgtttattttttgttgggatcgatacattgtccttgtttatagattagagcatgctttttaaagatgctgtattactcactgattttatttgtccagtgtacagagattgaagtgggaaaattataatggaaattgtttccatagtcattacatattaatttcatcaatttatttccataaaatctgtagattgctacttatttagatttttccttcaaatgtttttatgttgtattgcttgcactgagtatttattctatatgctcaatttgctggagaagaagactaattataacttaggcaagttgtaaaattagggaaaaaagtaaggtaccttacagcctagtttacttatttcttatgtaaagccagttagattccacattagttcaaactgccttctttgagcaaaacttgattggcagtgataaaggcttaaagcccttctcaagcagagacctgtaaagactagatctgactgtagtagaaggaaggaacttagatgtttcaggcagtgagaacaccagtcttccactctaaactttgccactaacagtatgaccttgggaagttgtaactttcttcagattcttcatttgttgaatggggggattggcctagctaatttctaaatctctactgggctaaaaaattctgtgcttatactctgattatgaagtacataatctgtgcttaacattcactgacttatccttaggataatacagaagcagtacaagaaacagcccctcaagatgtttgcagtctggttagaaagacaaacttatacacagaacagtagcaaatagaccaaaataataatagctgccatttatagaacacttcttctgttctgggcattagacaaaaactgactataacggtgaacaaaaaagacttaggtcctgccctcattgaacttacagattagtaggggagaggaacattaatcaagtaattccacagatggcttagcctagattggtagtgatggaagtaaagagatgtgaacggacttgaaaaaaaattcggaggcaaaatggatagaagtttattattgattaaatatgaggtgtgagagagagggatatttaagattgatacctaccttctggcttgcctaacagaaccaaaacaggaaattatatgttcagttttgttatgttgggtgggaggtgcttttgagtcattcatttatatatgttatatatgttattttatatgcatagtaattttaaggtctgagttttaaaccaaaggttagagagtgattttttagagtctagcaaacctaagttgaaatcctgcctgttgaaatggctgtttactagctcattaacctagggcaaagtattcaacttgttttcatttttgtcttcatctctaaaatgaggaaaatatggtcttacaagattgtcctgagagatagatgaaataatatccaaaaaaaaaaaaggtacatagagaaactcgtatagtgcctggtatatagtaggtcctccattggtagctatcattatctagttttaacatagccttcagtttgttgaattagtcaaactgagtgaagcactgcaaggaattcagaggaatttgagatcaacaaatgatttctgaagtttagggaagacttcatggcaatgacacttaccttgtataaaagttgaagaataagaaagatttgaatgagagattctttctcttctccctaccagcccagcttcttatttgaggatatattgggcaaaggggccttcagacaagtagagggagatttttacagaaagattgagatgaaggtatagaaggctgtaaagaccagaaaagagaattgagacagaggaagcaggaagccactgtaggtttttgagcaagatattgatgctgtaagtatggtgtttatgaaaggttagtctggaagagatttgcaggatggagaccccggaagtttttttgttataatacagaaagacttgcactgagggtgaggtgttaaaaataaacaggtaagtaaatgtttaaacatcttgaaggaaaagtcaacaaatcttggcaagtaaacagataacagtgaaaaagaatgggaccaagattttgagttttggagactggtggattgaacagacagggaaattgagaggagaatcagatgatgatgttttaagttgatatttagacagattgtgcttgagatggtaaagtcaatgtgggtgggaatgcttagtagcgagtaatcagtgatacaagaccaaagcccaggtcaaagacaagtcacagatacagatcagggctttttcatctgctccacagaggtgtaccctaggagctgttgcaaacagtccatgtggagggtgtgagtaagatgtttcccttgaatttgccagaattacttttttgttgttgttgttgttttttctgagacagattctcgctctgttgcccaggctggagggcagtggcgagatcgcgcagctcactgcaacctctgcctctcgggttcgagtgattctcctgcctcagcctcccaagtagctgggattacaggcttgtgccaccaagcccagctaatttcttttgtatttttagtagagatggggtttcaccatgttggccagactggtctcgaactcctggcctcgtgatctgcctgcctcagcctccaaaagttctgggattacaggcgtgaaccactgcacccggtcccttgttaagtttattttggtgggaagcaaaggaggtttcagcttttaaaaagtttgaaaattattgctctggtaataattaaagatttgagagtaaatatgctttctagcagaaagaataaaagaagaacagatagcctcaagaaggggagccaaagaagcaggctatatctgacacactgggtgttgataaatgggtattaaaagaatgagagcaatgagcagatagaagaggaaattaggagagtataataccatggagaccaagaaagatagactatcaggaaggagtggtaaaaataagttactagttctaagagagatgttaagagggaccggggaaagccttgtacaaatgagttagtagcattttacattatatacatctaattaagaaacaatgcgagagtctcaccattcctatagactcttacttgtacttgtctgaacacgaaaactggcttttgtttataaataagctaaaaattattttgctccaatttctcatgaaaataaaaataaaccttcttttaacattgaaaaaatagtttgaagacagtcactcttcattttgtaattcccacaactattattgaatgactgaaattatctttattctgaagccaaaggggtgatactgatatttcttcagactactaaaaatatattttatgaatttttagtgtgctttatctttttttgtttttttttttgagatggagtttcactcccgttgctcaggctggagggcagtggtgcaatctcagctcactgcaaccttcgcctcccagattcaagcaattctcctgcctcggtctcccaagtagctgggattacaggcacctgcccccacacccagctaattttttgtatttttagtagagacagggtttcaccatgttggtcaggctggtcttgaactcctgacctcaggtgatccacccaccttggcctcccaaagtactgcgattgcaggcatgagccaccatgcctggcctgaggaatatttttctaggttccccccaccccaagcatttattctgcaattttagttttgttcctaaagcaagcaaggtttaaggatttaaaaataatccgtattttagaatgctttctggctttgttactttttatccacagtagaagttctcagagaatgatctccctcttttaatttaactttttggcacagtattttgagaattataaataatattagaatgttttctggctgggtgtggtggctcatgcctgtaatcctggctacttgggaggctgaggcaggagaatcacttgaacatgggaggcagaggttgcagtgagccgaggtcatgccactgcactccagcctgggtgacagagcaagactctgtctgggaaaaaaaaaaaaaaaaaaaagagtgttttctttcctattttccaccacttgattaagttacttttcctcttaagtattttttgctgagtatgctgacttaagagtaatgttacaaaatttaatttttaaagttctctgaaagcccctttatgagagttttaggctatcaaattgtgtttaattcttaacaattttttgaaaaattatagcttcaatatccgtacattccccacaaaaaagcactaaaaatcatgccttgctggaggctgcaggaccaagtcatgttgcaatcaatgccatttctgccaacatggactccttttcaagtagcaggacagccacacttaagaagcagccaagccacatggaggccgctcattttggtgacctgggtaagtaactatcattttttattaacttgtattagaaggatttgagtacaatatgtgaaacttctgtcataggatacagaactatataattggaaagtgctttggaaaaaatgtatttaaaataacagctacaagtataatgggtagctgtgttgtgttcctgtaaatatagaatataaagcatgcccagtagaaaaacaagcatttccagaagaaatatatctgatcactaaatataaatatatgaaaaagatgtctcactttattactgagggaagtgcaaattaaaataatcagttaatgttctcctaacacattagcatattttttaaagtttgacaatttgaatgtcagtgaagatgcagggaaatacccctcctatttagtgataatataatctggtgaagactctttggaaagcaatttggaaatcagtataaaatatgcatgtcatttaggccactctttctaagacctagccctcagatatgctcattcatatgtgcaggtgtgtatgtgtgtgtgtgtgtgtgtgtgtgtgtgtatatgtatgtatgtatgtatgtatgtatgtatgttgaaggctattcattatagtattgtttgtgatagcaaaaaattatggacaacatataaatatctgttatagggaaataaccaaattgtggtatacgcatgctctggagtataatatagccatttgtttctatttatttattttcttgagacagggttttactctgttgcccaggctggagtgcagtggtatgatcatggttcactgcagccttcacctcctgggcacaagccattctctcgcctcagcctccagagttactaggactgcaggcatgtgtcaccacacccagataattttttaattttttgtagagacagggtctcactatgttgcctaagctggtctcaaactcctggcctcaagcaattctcccacacaggcctcccaaagtgctgggattaccaacgtgaaccaccacacctggttcagtgtagccatttagaaatctaaaaaagacgtgggaaaatgtctaaggcatgtttaaatgtgagaaaagcaagtcacagtatgcatggtaaaatccgttatattaaaataagttcttccaaaacaaaaacatatgcaggagacctttattttgtcagtatttcttacccaaatttctgcacttagaaaattgcatgtcatgttgtcataagttgaaaaaaagatccatgaaccaatggacttctaataaaatcagtcctgcttttgacatctctctctacttttgtgtatattcaaaccagagtgtcaatgtgtttgtggggcacacttagcaataatacatagcagacaaaatgcatatagctcagagagtaaaattgtaagttttgctagatcactcataaattgctgatgagaatttaaaatggtgcagatgctctggaaaacaggcagtttctttctttctttttttttttctttttgagacagggtctcactctgttgcgcaggctggagtacagtggcgtgattacaactcactgcagcctcaccctcctcaggttcaggtgatcctccctcagtctcctgagtagctgggactataggcatgcaccaccacgcctggctaatttttgtattttttttttttttttttgtagagacggggtttcgccatgtttcccaggctggtctcaaactcctggaatcaagcgatccacttgcgtaggcctcccaaagtgctgggattacgggcgtgagctactgtgcctggcctaggcagtttgtttgtttgtttgtttgtttgtttatttatttgtagacggagtctcacaggctggagtgcagtggcccaatttttggctcactgcaacctccgcctcccaggttcaagctattctcctgcctcagcctcctgagtagctgggatgacaggtgcctgccataatgcctggctgatttttgtatatttagtagatatggggtttcaccatgttggtcaggctggttttgaactcctgacctcaggtgatcagcccgcctcggcctcccaaagtgctgggattacaggcatgagccgtcatccctggctggtggtttcttatgacgtgaaacatgcaattaccatatgacctagcagttgcactctgtatttatcccagataaatgaaaacttaccttccaataaaaacctgtgcacaaatgttcatagcagcttaatattgaaaaactggatgttcttcagcaggtgaatgaactggttcattcataccatggaataccattcagcaataaaaaggaacaaactgttgatacatttaaccacctggatgaatatcaagggaattatgctgtcagacaaaaaccagtccctaaagactacatatagtatgattccgtttggataatattcttgaaatagagaaattaagagaaatgaaaagattagtgtttgccagatgttagagacagggaggtgagaggggtaagtgggtgtagttataaaagtgcaacatgagggatctttgtgatgttgaagttgtatcttggcagtggatgcagaaatctcaatgtgataaaattacaaagaactaaaaacaagaatgagtatagataaaactggggaaatctgaacaagttagagtgttgtatcactgtcagtatcttagagtgatattgtactatagctttgcaagatgttaccatgggagaaactaaagtgtacaagggatctctaggtattattatttttttagagatggggtttcactatgttccccaggccggtcttgaactcctgggctctagtgatccgcctgccccagcctcctaaagtactggaattacaggcgtgagcgaccatgcctggccctttcagtattgtatcttagaacttcatgtgaatctagcattatctcatagaatttaattaaaagaaattgtaaacctcacagaagatcagaatttcctcaagtttgtgatgttgacaaagatgaactagttgacactgacagtaagactgaggatgaagacacgacgtgcttcaaaaaaatgatttgaatatcaatggattaagaagaactcttttgacaaattgatgaaaccctcagtcagttttataagaatgcccatctttatgatcatgctatgaaagccaatttttaaaaaaattttttgtctttcctaacaattagcttgtggttataatttaaatttagttaaatataagataaatgattttttattaagtttagtttcatttttcaaggtacgatctcaaagctactctttaacctactatgaatgaataatgctgagttcataacatctttgtagatatatccacaattttccctcaggataagtgcctacaagtggaattactggactgaaaataatgcagtttgctaagactttgctatctgttcctgaatgctcctccaaaaaggttttgccagtttacatcctcatgaccagcgaatgagagtgttgcctattttcctgtgcccttgttactgcttaataatttttgaaaaaaatctaatttgacagacaaaaatgcattttatgttaatttgcttttctgggatttttaatgaggttgagtatagtttttaatatttttattggcccctttggaactagtatcataagttttttttcttaagaatttatgtagtctgggctgggcgcagtggctcacgcctgcaatcccagcactttgggaggccgaggtgggtggattgccgaaggtcaggagtttgagaccatcctgaccaacatggtgaaaccgaatctctactaaaagtacaaaaactagctcagcgtggtggcgggtgcctgtaatcccagctacttaggaggctgagtcaagagaatcgcttgaacccgggaggtggaggttggttgcattgagccgagatcgcgccattgctctccagcctaggcaacaagagtgaaaagtctcaaaaaaaaaaaaaaaaaaaaaaaaaagaatttacatggtctgaattgccattaaaagagatatgagaattattgagtaacaaataactttttaataatttaggcaagttttggacgattgtactttgtttagaaaccaaaagcatagtatttgtagtttttttatttactttagttgctaggaagtaaactttattcaaggtctctggtaccagttgttgctaaaagtgattgactaatctgtcaatctgaaattatttgttgctgaactgctaattcttttgcttctatcttttaggcagatcttgtctggactaccagactcaagagaccaaatcaagcctttctaagacccttgaacaagtcttgcacgacactattgtcctcccttacttcattcaattcatggaacttcggcgaatggagcatttggtgaaattttggttagaggctgaaagttttcattcaacaacttggtcgcgaataagagcacacagtctaaacacagtgaagcagagctcactggctgagcctgtctctccatctaaaaagcatgaaactacagcgtcttttttaactgattctcttgataagagattggaggattctggctcagcacagttgtttatgactcattcagaaggaattgacctgaataatagaactaacagcactcagaatcacttgctgctttcccaggaatgtgacagtgcccattctctccgtcttgaaatggccagagcaggaactcaccaagtttccatggaaacccaagaatcttcctctacacttacagtagccagtagaaatagtcccgcttctccactaaaagaattgtcaggaaaactaatgaaaagtgagtatgtgattttcttgtgtgtacatatgtgtctcactttctttttttaatttactaagcagaacttcagatgaggaataaaatgattggaatattttttttctcctctaactacttgtaaatttgggagaatttggagagtgtagtagagtcagatcagtgtatggaaaaggagcaggagtgactggaccttctaagaagtgtgttatcagaattagtaaatgaagggtcaaatgtcctacttttcccctccactgattttgacatcaaaccattatccacatagccttatttcctccctcggtcttaattttattaatattttactgcactttgcagataaaatttttaaaaaatttttaaaaattgccaataagtgacatttattaagttcagtgcttagtgtatatttggattttatttattagtcacaagacctttgtgcaggtagtaggcatgattatctttttttttttgagatggagtcttgctctgtcgcccaggctggagtgcaatggcgcggtctcggctcactgcaacctccgggttcatgccattctcctgcctcagcctcccaaatagctgggactacaggcgcctgccaccacacccggctaatttttttgtatttttagtagagacggggtttcaccatgttcgccaggatggtctcgatctcctgactttgtgatccgcctgcctcggcctcccaaagtgctgggattacaggcatgagccaccgcgcccggactgattatcttatttacacatgagaaaaccagggcttagaaaggttaggtaacttcctctaggttgtacagtaaatgtggacctagaagcattttgacaagagcacctgtttttttttcttctctattagtttagaaattatatactcttaattatcacctgggattttgattagacagccttcatgttctttttcatcttaaatgttctttgtgtcttaaagggctaagtgatttcttcagatcttttagttcactcattctcagtgaactaaaatgaggtctaatctgctactgaatcaagttttcagcatgttatttccttcctccctccctccctccttccttccctcaaccaggctcccgaggagctgggattacaggcgcccgccaccactcctggctaatttttatattttagtagagacggggtttcaccatgttggtcaggctgatcttgaactcctgacctcaagtgacccacctgcctcggcctcccaaagtgctgggattacaggcatgaatcaccacacctgacggcatgttattttcatcgcaaagttactgtaagctgggagaagtggcacacacttgtactcccagctactcaggaagcttaaggtgagaagattgcttgagcccaggagttttgagaccaacctgggcaacacagcaagaccccagctcaaacaaagaaaaaaagttattgaattttttatttctatggatcattttttgtagtttcttattcctttcacccttcattcccacttttgatcccatcttttatttatttagttttattaaatgtatatttgtctgataattctgctatctacagttttttgtggacctgactcagcatttctttgtttcttcggattcagactgttggtggcttgtgattttagtgatttttggccgtgaacatgtttcttggacttttgtctgtgggaattctctgtgtactctgtataaattaagttacttcaggtgttttgcattttcttttgccatgcacctggggcctgggtcactacccttctggtaccacttaaaactgaatttttgtcttgggtgctcgtactgatcctgtatgagtacaggtttatacttactgtagaaatatggtgtttgattatggggtattgtcccagatggtgctggagtattaatatgctctctgttaaacttaatgtgttgtccctgtaaaactccaaaattctgaattccagaatactactggccccaaatgtttaagataagggcactgcctgtatttgtttctgcctcccactattttccttagtttaacacaaactcacctttttaaaaaacattttgagagaattcagtattgggaagagtttctaacctgtttctggaaatggaagtccaaagtctgtttctgtaattgttttttttttgagatggagtctcactctgtcacccaggctggagtgcaatgacgtactctcagctcactgcaacctccacctcccgggttcaagcgattctcttgcctcagccccctgagtagctgggattacaggtgcccaccaccatgcctggctgatttttgtatttttagaagagatggggtttcgccatgttggccaggctggtcttgaactcctgactttgtgatctgcccacctcagcctcccaaagtgctaggattatgtttctgtaattgtaatacatttattgtttttagaaactgtctttgctttagtggtaattttcaataaaaatagaaatagcagtggagttattaaaagagcattagttacatttttccctttttcattatcttcaaatattatatatagtaagtttgacctttttaaaatgtatacttgtatcagttttaacacatacatagattcctgtaactgtcaccactataagggtaaagaacagttagttccttcacctttgaagtcaagccccacctctatcccaacacttggcaaccgctgatctttctccgtctcaatagctttgccttttctctttttttttcttatttttttttttgagacagcgtcttgctctgtcgcccgagctggagtgcagtgaggcaatctcggctcactgcaacctccgcctcctgggttcaagcagttctcctgccttagcctccctagtagctgggattataggcacgcaccaccacacccggctgatttttttgtatttttagtagaaatggggtttcaccatgttggccaggctggtctcaaactcttgacctcaagtgatccacctgcctcggcctcccaaagtgctgggattacaggcgtgagccactgtgcccaatcaggactttttttttttaaatttacattcaacttgtcatttttttcttgtatggattgtgccttcagagtcacacctaagagccctttgcctaagcaaaggtcatgaagattttctcatatgtttccttttaaaagtattgtggttggccaggtgccatggcttatgcctgtaatctcagcactttgagaagctgaggtgggcagattacgaggtcaggagatcgagaccatcctggctaatgcggtgaaaccccatctctactaaaaatacaaaaaaaaaaaaaaattagccgggcgtggtggcgggcacctgtagtcccagctacttgagaggttgaggcaggagaatagtgtgaacccgggaggtggagcttgcagtgagccgagatcgcgccactgcactccagcctgggcaacacagtgagactccatctcaaaaaaaaaaaaaaagtattatggttttacactttacgtttagatatatatcttttttgagttaatgtcgtataagtatgagggttacgtcagattttttgttttttgtttatttttacatatggatgtctagttgttctaataccatttgttgaaaagacaacctttactccattgaattgcctttgtacttttgccatatttgtctaggcctgtttttggactcctttttctgtttcatgatgtgtgtgtctattcctttgttaataccacatggtcttaattactgtatagtaagtcttaaaattgggtaatgctggccttataaaacgaattgggaagtttttatttttactcttatttccattttctagaagagattgtgtagaattggtgtcatttcttctttagatatttggttgaattgggaagtgatgccatctgggcctagggttttgttttttgtgtgtgagacagagtctcacttctgtcacccaggttggagtgcagtggtgagatcttggcttactgcaacctctgcctcccaggttcaagttatcctcctgcctcagcctcccaaatagctgggattacaagcgtgtgccaccatgcccgactaatttttgtatttttaatgcagacagggtttcaccatgttagccaagctggtctcgaacttgtgacctcaagtgattagcccaccttggcctcccaaagtgttaggattatagatgtgagccaccgtgcctggcaggggcctagggttttctttttcagagtattttaaactatgaattcagattatttaatagatataggactatttaagttatctgtttcttcttgagtgaatttttactgtagtttatggcctttgagtaattaattgtattgaattgtcaaatttatgagcgtgtaattatttatagcatttcgggtttgtagtggtatccctcttttattcctggtgttggcaattgtgtcttgtttttctttgtcagattgtatagggatttattagtcttttcaaagaactagcttttgttttgatttttctgttgttttgttttcaattttattgattttctgctctttattatttcttttctattatttctgcttgctttgggtttattttactcttttttttttctccaagttgcttaaagtagaaacttagatttctggtttgagacctttcttttctaagataagcatttaatactgtaaatttccttctaaccactgctttagttacacccccacaaattctggtattttgaactgagcacaaatgaaatgttctaatttcccttgaatcttattcttttaccaatgaattatttagaaatatgttatttagtttgcaagcaattggagacttttttcctgttatttttctaccatttatttctcatttcattatattatggtcagagaatatattttgaatgatttcatttattaatttttaaaaataacattaaaaaattttttaaaatgtgaatataccacatacagtataaagattgtacattctgtttttggacagttttctataaatgtcaagttgatttagttggttaatgatggtgttcagtttttctttattcttgctgatactttgtatgcagttatatcactttattactcagaagagtgttgaactttccaactacaatttttttttccaattttactttcagctctatctggttttgcttcatgtattttgaggctctgttgttaggtgtgtacacattcaggatgatatcttctgggtgaattgcctgttttatcattatgtaattccctctttatggtaattttccttgttctaagatcagaaatatctgttgtccaatttatatagacactgcagctttcatttgattagtgcttgcatggcatatctttttccatttttttacttttgatctacctttataattctatttaaagggggcttcttgtaggcagcatatagttgggtagtgttatttatttatttatttatttatttatttatttatttattgagacagagttttgctcttgttgcccaagctggagtgcagtggtgcaatcctggcttaccacaacctccacctcctgggttgcagtgattctcctgcctcagcctcccaagtagctgggattacaggcacgcgcaccatgcctggctgattttttgtatttttagtagaaacggattttcaccatgttagccaggctcgtcttgaactcctgacctcaggtgatccacctgctttggcctcccaaagtgctgggattacaggcgtgagccactgcacccggctgagtcatgttatttttaatcttttctcacaatacagggtttttgttggtaaatttaattattttaatataaattttagtataattatttacattaaatgtaactgttgcactggggtatttataatgtgtaaatataattattggtattaatataattatattactcataataatattaatatctttggatttagattaccagtttagtatatgtttttctgtttctccctctttgatttccccttttttgctttttttttttttttaattcttatttttttttagtatttgttgatcattcttgggtgtttcttggagagggggatttggcagggtcataggacaatagttgagggaaggtcagcagataaacatgtgaacaaggtctctggttttcctagacagaggaccctgcggccttctgcagtgtttgtgtccctgggtacttgagattagggagtggtgatgactcttaacgagcatgctgccttcaagcatctgtttaacaaagcacatcttgcaccacccttaatccatttaaccctgagtggtaatagcacatgtttcagagagcagggggttgggggtaaggttatagattaacagcatcccaaggcagaagaatttttcttagtacagaacaaaatggagtctcccatgtctacttctttctacacagacacagtaacaatctgatctctctttcttttccccacatttcccccttttctattcgacaaaactgccatcgtcatcatggcccgttctcaatgagctgttgggtacacctcccagacggggtggcagctgggcagaggggctcctcacttcccagatggggcagccgggcagaggcgccccccacctcccagacggggcagtggccgggcggaggcgccccccacctccctcccggatggggcggctggccgggcgggggctgaccccccacctccctcccggacggggcggctggccgggcgggggctgaccccccacctccctcccagatggggcggctggccgggcgggggctgccccccacctccctcccggacggggcggctgccgggctgaggggctcctcacttcgcagaccgggcggctgccgggcggaggggctcctcacttctcagacggggcggccgggcagagacgctcctcacctcccagatggggtggcggtcgggcagagacactcctcagttcccagacggggtcgcggccgggcagaggcgctcctcccatcccagacggggcggcggggcagaggtggtccccacatctcagacgatgggctgccgggcagagacactcctcacttcctagacgggatggcagccgggaagaggtgctcctcacttcccagacggggcggccggtcagaggggctcctcacatcccagacgatgggcggctaggcagagacgctcctcacttcccggacggggtggcggccgggcagaggctgcaatctcggcactttgggaggccaaggcaggcggctgggaagtggaggttgtagggagctgagatcacgccactgcactccagcctgggcaacattgagcattgagtgagcgagactccgtctgcaatcctggcacctcgggaggccgaggcaggcagatcactcgcggtcaggagctggagaccagcccggccaacacagcgaaaccccgtctccaccaaaaaatgcaaaaaccagtcaggtgtggcggcgtgcgcctgcaatcccaggcactctgcaggctgaggcaggagaatcaggcagggaggttgcagtgagccgagatggcggcagtacagtccagcctcggctttcacaactttggtggcatcagagggagaccggggagagggagagggagacgagggagagccccttttttgctttcttttggattatttgaatttttccttaaatttatttatcttacttatttatttatttttttgagtgattctcctgccacagctcccaagtagctgggactgcaggcatgtgccactacacccagctaatttttttgtatttttagtagagacagggtttcaccatattggccaggctggtcttgaactcttgacctcaagtgatccacctgcctcggcctcccaaagtgctgggattacaggcgtgagccaccatgccctgcctttttctagaatttatatattgagttcttgattgtatctttttatgtaggctttttagtggcttctctaggaattacaatatacatacttttcacagtgtactcacatttaatattttgtaacttcaagtggaatgtagaaaacttaaccaccataaaaatagaactagggatgaggttaaaaaagagagagaaaagaaatgtaataaagatttaataacaccgtttttttttttttttctcttttttttttgagacagagtctctctttctgttaccaggctggagtgcagtggcgtgatcttggctcactgcaacctccgcctcctgggttcaagtgtttctcctgcctcagcctactgagtagctgggattacaggtgcgcgccaccatgcccagctaatttttgtatttttagtagagacggtttcactgtgttggccaggatggtctcgatttcttgaccttgtgattcgctctcctcagcctcccaaagtgctgggattacaggcgtgagccaccgcgcccggctaagtctttaaatatttttttgacattgcactttttctcttttccttctaggattttagtaacccaaatgttagttttgttattgtttggcaggttcctgaggctttccttacttctttaaatttttttttcctgttgttcagcttcgaaaatttctattcatctgtcttcaaattcactggttctttcccgttatttccattctgttattgagtctttgtagtgaattttaaattttgtttattatgttttttagttctaaaattttctttttttgtgtatgtcttatactttgctcctgaaactcttatttgtttcaggagtgatcttatttcttagagcatggttttagtagctacttaaaatttgttttatcatcccagcatatgtgtcctcttgattgtcttttctcttgtgagataatgggattttctggttctttatatgacaattaattttggattgtatcttggacagtttgacttacgttacatgattctgaatcttgtttaaatcctgtggaaaatattgaagtttttgctttaacaagcagttgacctagttaggttcagtccacaaattctaagcagcattctgtcggctctggttccatcatcagttcagttttgtatcttatctgcttatgtgcctttctgtgtccagtctgggacctggccaatggtcaggtcccaaagcctttgtacacttttagaagcagggccatgcacacccagctcacgagtggccccgggagtgcacatacaactcgacgttttcatgggctccttcttttctgtgatgtccctgacacgttctgccttctaagaacctccctttatccctttcctgttgtctggctagaaagtcagggctttagattccctatacttcagcacacttcctgtagctatgtcaacctctgtggccacgacttcttcttcttgggactgcagtttctcttgtcagaaagtaggattcttggagctgctgtcattgctgctgtggctgctctgatgctgcctgggagtcgaaggagagaaaggaacaaaacaaaacaacccaggggatttcctccactctctttgatccgtgagagccccctttcctgttcctcagaccagaaatagagggcctgtcttggaacttcttctttgtgcatctggtgtgcagtttcagcttttgagtccaggccaggaggtgctggacaaacttgtcaggagtacggaggtactgcaagttctgattacttttctcagtccacctgcttccaagtccttggatgcatttgtccattgttttgagttgcattccatgggagagacagaagagtgtgcttatttcatcttgacatacttattaggatttcatatcaaatcaacggatgatattctctatattaatttgctgttttccctttagcaagcacattaggaaaataacactttaacacccgcctttggtggtttctgtcataattattaatacttgactttttttttttttttgagacggagtctcactctgtcctttgaggcattgtccccataaacttttggtaaagcatcaataattttatctttcatccacacaagcttcaccataaatttgatgtttattcttccattttagcagaattcatgttgctccaataggggctgtcttcaaactgatgttttctccttcttagtgcctcagagtagatcctgttcagatacgttataacaggttaatatgagtttattttggtgtaaaagtactttgaaattcatgcatagttttttcatcatatgcattttccatagctttgaacacccccatgtaactctcctcttccacaaaccaaacaatgaaaaagcacctttgtgatggaagtttattttgcaataggaactcacagtgatctaagccctgctattcatgaatataattcattactggagtccaagttgctttttggtttttgaagttctcttcttcccttgcaggtatagaacaagatgcagtgaatacttttaccaaatatatatctccagatgctgctaaaccaataccaattacagaagcaatgagaaatgacatcataggtaagcagtgcttgaaactatggcaaaaaaaaaatgacaaaaaatgcacagaactgacaattttcgttattgactaagataattttttcttaacatggaatttagcagttcccttcctaatttgttttctgagtattttttatatcggattatagctcactttaaaagtttctcggctgcattcggtgcgagggtctttgcctgggccagatgggctgcagtgtagcgggtgctcaggcctgcccgctgctgagcagccgggccggcgggcggctacgctaaccggcacagaccaccggatggactggccggcagccccgcaccagtgcacgaagtgggcgggacagaaacttctggggttggaagtccagtgaggctaaaagccggtaccaaagtctctaggcatcagggctgcagcccaagagtctcacgaccagtgggcaactggatggccagacaggtgtctcagtggtggcctctccgtctcagggcttcatcccacttctcagtgggcctgacgtccctgggcaccctggatgtctacctgcattagccagagccatcacatggcctgtgacttgcctttttttgccagttgattgtgccacacacagtgtcatttctgtgtcatttggcacagctggaggtgcaaggaggagggcagcctcatgtccagtcccagtttcacgtaactttattcttctgaataaagacaatttgctaaccttaaaaaaaaaaaaaaaaaaaaagtttttcttatatgttggacccaaattcttaggctttaacctgaataacaatgacagcaagatcaataaatagtacacatttattaaacactcactgtgtcccagacaatattccaagcactttttatggatagactcattttaacttctaaagaactttgtgggataaatacagttattttatagatgaagaaactgaagcacagagaagttaagtgctttgtccagggtaacagctcagatatggcagagtcaggatttgaaactagaccctcacataccttaactgctgtgctgtggcagtgtttttcatactgtaggttgggaccagccttctcttatgccctcaccccctgccaaaaaaaaaaaaaaaaaaaaaaaatatatatatatatatatatatatatatatatatatataatatatatatatataaaatatatatatatataaaatatatgtattagtatatatgcatatatagtatatattatatattagtatatatactaatatataatatacatattagtgtgtgtatatatatatatactagaataaaaaaatcaaagtatctcagagtagtaaggacaaacatttcagaaaaatgttttcattatatatacatgtatgtatgtgtatgctgattcaacaaatatatttcttataggttatagcaaaatagtttgaaagcttttactgtgttttatcaggaagaccttaggtgaacgtatattcacagataaaagaggttatttattcattcaataaatattacattctcataagtcctaatattatgtatttttattcttcaaaaaagttagtatttgtgatttatgaaataagacatgttcttgcacttttagcagatctgtcccgatgttgggcttctttaatccttagtgtgggtgctttgcactcactcactgctggggacagcaagacccctgttagtctcagctgtgtttcttaaattggcccactgtaccttccagttagctattctggggtccatgtcatgttggctccattttccttttctttctcccacacagatacctataacggctataacataggcctggtggctgttggtggcttatccctatctgcttgtatttaaggggtactgtttcactgagttttgctgacagatgttgtcatgagatttgaggttttctgtgttgttgctctatttttatgtgggaatttgctactatcatcatccctagaccagcttttcctagtaatacaacagggatgttctgactgattagagtttgcctgtttgaagaattggttggctagtgatttttttttgaggggagtctgtaccagttaatagcctgactggcgtgtggataaaaaggaagcagtttcaagtcaaataaaacacttaaaatgaaaccacactgcaactctctttcttttacttaagcttaatcaaattaatgatgatgtaatcccatgaaggaaaagtcttctgaaggatcaagttgataacattttgtgatcaaagaatttgagaaaacctctatcccagtgtctatcattatatattttaggatgttaattacctgtgtggctttaggcaagtcatttttcctccttgagccccattcttaatcctgtccaaattatttgtctcctcttgcagttggactattttaatatagctgtccttcaagtgagttttgttcaaaggagccttcactttagctcttactgtgtacccactttgcatagtcttgttttaaatgtaatccttggatttttggtgttgctaactaattactgtttttatgtgaggatttagagtgatccagaatctatacttgcactacctccttcatcttccacaaatgtttgaagtggtagaatttttaaaaactttgaaggtacagctgacagaatttgctgatggtttggaagtgagtggtatgagagggaaaaaaaggaataaagcatgactgcattttttgtttgtttgtttgtttgtttttgagacggagtctcactctcgccaggctggagtgcagtggcgtgatcttggctcacggcaacctccgcctcctgggttcaagcgattcccctgcctcagcctcccaagtagctgggactacaggcgctcgccaccacgcctggctaatttttttttttgtattttagtagaaacggggtttcaccgtgttggccaggatggtctccatctcctgacctcatgatctactcaccttggcctcccaaagtgctgaggttacaggcatatatataagcatataaagtgtgttatagcatacaaacaggtatatatataaacatgcagtccacacagctgataggaatgaggcagtagtgaaggagaagttgatgtaggagaggggacagttgttacaggaaagaagtctggaggcagaagggatgaattccagtgctcacatagaagattgcttagatgggagcaaggacaatttatctagagtcacaggaaagaatgcagtacacgggtagagatgcaggtgagttgaaagatgtgagagatgatggaaataattttctgattgcttctatattctcaaggaagcaggaagcaaagtcctcagcaaagagaatagaagaggtgttaaatatttgagaaaggagatgtactgtagaaaaaaaaaaaactcagtttctccttctgaactctcacaaaacagaacccttccatgactctagttgtgtggggttttttccctgtcagctaccaattctgcagatgattgttcagtgaacaccaactgggtgtcctctaagtcagttcagttctcacactgtttacctggagatagcatcagatcccacagattgaggactctgtcccacaagactgcctccacttcagatgccagtctcaagtacaagttgtggcctgtgcttctgactgaccttctataaattggagttcccacagtcccctccttgggttcaataaatttgctagagcagctctcagaactcagggaaatgctttacatatatttacccatttattataaaggatattacaaaggatacagattgaacaggcagatggaagagatgcatgggcaaggtatgggagaggggcacagagcttccatgcactctccaggtcatgccaccctccaagaacctctacagatttagctattcagaagcccccctccccattctgtccttttgggttttttgtggagacttcattatataggcatgattgatcattggctattggtgatcagctcaaccttcagccccctcatcccgggaggttggtgggtagggctgaaagtcccaaacgtgtaattctgccttggtctttctggtgattagccctcatcctaaagctctttagaggccacagccacaagtcatctcattagccttcaaaagaatccagagattccatgaattttaggcgctgtatgctaagaaactggctaaaggccagttgcaatgtctcaggcctgtaatcccagcactttgggaggctgaggcaggaggatcgtttcaggccatgagatcaaaaccagcctggtcaacatagtgagacccccttacaaaaaatttaaaaattggccaggcgtaatagctcttgtctgtagtctcagctactcagaaggctgaggatcactgagccctggagttgaaggcagcagtgagccatgatcgtgccactgactccggcttgggtgacaaagtgagaccttgtctcagaagaaaaaggaaaaaaaaaaaactgggcaaagactaaataacatatttcacagtatcacagatttgtattgtctaggaaagtgaatgtaaacagaccaggacactagtatgatcccttggtttcatgaaggtcccactaaagtcatgaacacaaagtgagactaggcatcatgttatatggtttttccagccatgtttaacagctagctaaatagctaattgtttcgctgcagtttattttagcagttccttattttagcacatttcatgttttaaaatttctaccaataacattttaataaacttttttacagataacttcacaaatccataattttttaagttacaatcccagaaatagaattgctcattgaaagggtatgttcatttttaaagttatgctagaaactgccaaattgccttcagaaaaaggtgtttgtatccccactaacactagtgttagttttcttgtgcccttgctcaagtatacatattattaaaaacaatgttgggccagtttactagataaaaggtgtagtgcctccttattctaatctatttgattactagtgagtatgtatgtcttttcacgttggtcattttatgtttgttcctttgtggattgtcatgtcctttgctcatttttcttttggaacatttcttagtagtttataagagctcttggtattttaatgatagtaaccttttaactgtcatgcatgctgcaaatcttttttctgtttgtttgcctttgtattttgtttttggagggtttctatgtataggaattaaattttatgttgttaaatcttttgatttctgcttttgcatatgtacttcaaaagactttctattttaagatcaagtgttacctgtattttcttttagttctatttaaaacctcttaatttatatgcctgtgctgttaactcccaagttgattcacaagtgtgtatacatagtttgaatttagtggcaatttaattatttacaacttcttttgcagcaaggatttgtggagaagatggacaggtggatcccaactgtttcgttttggcacagtccatagtctttagtgcaatggagcaagagtaagttagttcatattttcacattgtgcatcctagggaatttgggttcattgttaggaatgggcttcactcagctaaaaacaaagtatttttgagaatttaaatattttggatatttacaagatcatataaagcatactctatcttggttaacagtttcttttaaatataaattatgtgaactcttaaaattttcattttcattttcaatgttaatatttcctaagttaaaataatttgtttttagttctgaaataatttggggagtgattgagtctgtagtgattatgactattagaattggtttatttatttaaataatgcatgtcttcagatggctctcctaatttgttagttaggctttaagctaaatggatgctatataactaaatccacatagatttgttgaaatggctccagaggttttttagatttattactgctatgtgcccttaaaaaaaatctattcattctttcacttaacatttatcagaagagtgctctgtgtaagacgtggttaggcatagtgccagtcttgaaggaagttacagcctaataaaagacatagggcatgttgtttggttactgtaatatgaagtggcatgtgttaaatgtcaggggagaactacaaagtcataaaaaggtgggagagattacatacaggtaaaggaatcaggaatgacaccatggggagtaaggtagtgttgacctaggcctttaagatacaatagggacagtatggaaagagtatatttttcccacttaaactctttccttggtcgttccctcaaattttcccttttgtccatgtgcaggcactttagtgagtttctgcgaagtcaccatttctgtaaataccagattgaagtgctgaccagtggaactgtttacctggctgacattctcttctgtgagtcagccctcttttatttctctgaggtaaagtctgcatttcttttcacactctattcgagcattccagcctctaactatcaatgctggggccctgtctataggaaataacacagaagagccaagtcatttccaaaaagatgtatcattgtttcaagttgtttctgatggcaagagtaatttaataatatattagagagaacatgaaaattcaatgtattaaataactctaattttgagaaacctaattaaactactgcatgtaagagagtgcatgtttttaattatttggagctattttaaaaccacagaatttgaaacttgcttccagtgcataaattgcagaccagacttcagaagagaaaaaaagtagtaaattttttcttatgctcatcatttttactttagtcacttgataggattgcccagtgaagaagcatttgcaacagacaatgagtatattaatctttttgaggcatacagtttagtataatgctctttgttaggcttcaacaagtgaaattattttgttggaaagcaaatgactattaagtagaaagaggattcccagtctcacaaagcagtaatttagacactcgattctgcctctttacaagaatacaggtactcagttgatttgttttctcactccctttctttgctataagtttaaatcaacaatttgtttaggttaatatgtcctcatggaatggtggaaatgatcagatataaaatatttggtttggttagtttactctttatatgtttgctggcaaggaaccacaaatccagtttagtataatttttactctagttcactaaaagtttgcatccagctgtgtaggtagtgtttgtttcttgttaacttttttttcgtctaaaagaatactttaaaacttttcaatctcaaatgactgtaacttgctgacaggtgttaacagaagaagtagatctttttgttttttgcttatgacctgtattttaatatttgagcttatagattagagattgtgagagaaatctgtttatagtcttattttcccttgtgtattttttcttcctagtacatggaaaaagaggatgcagtgaatatcttacaattctggttggcagcagataacttccagtctcagcttgctgccaaaaagggccaatatgatggacaggaggcacagaatgatgccatgattttatatgacaagtgagttatattgatagatggattcagcagatacttattgaacatttgatatgttttgtggaaataaagatgaataaactcagtctctgttgtcaaggagctcacaggaggcagcataaaagctgcttttatatggtgtttgtaaagctttgggggttcttagaacaaaagtttctgctgggaaaggggaggtgtatgtggggtaaacaggatggcaatggtggtgttcaaggagtgtttcccagaagagagattttgtttggatcccaaagaaagaagggaattttgctacccagagaaggcagaaaacaacattctaggcaaaggcattggcccagaagccatggaaacgtaggggaaagtggcactttcaagaaacttgagtttagataatcaaaggagtggggaataaatatgaggatgctggtactaattggaatagattgtaagggaccttgaatgcctatttatgggtatattatactttctgtataaatctgctcaggcacgttgttaattagttttttattagttttcactgaaaatgagaggatggaaacatcatacagtaaacaaaattgaaaatatctggtcaggcagatgatgagcttgtggccagctctgtaacgtatggtattcttttcatttaacttttcttactctgtaaaaaaagtaattcgtggtcgggcacggtggctcactcctgtaatcacaacactttgagaggcagaggcaggtgaatcgcttgagcccaggaatttgagaccagcctgggcaacatggcaaaacccgcctttactaaaaatacaaaaattagctgagcgtgatggcgtgcgcctgttgtcctagctacttaggggcctgaggcagaaggatcacctgagccttgggaggtcgaggctgcagtgagctgtgatccactgtactccaccctgggcagggcagtagagtgagaccctgtctccaaaaaaaaaaaaaacaacaaaggtaatttgttatttgtatccttaagcaaatgctaaaggggtaacttggggatagagaaaagtccacagatgttagggtttgaagacactaatagtatctaggccagtggttcctgaacattagtctgtgggctcttgctgggctgtctgcataggaatcacctgagagcttattaaaaataggttttcaggctggttgcggtggctcacgcctataatcccagcactttgggaggctgaggcaggcggattacttgaggtcaggcgttcaagaccagcctggccaacatggtaaaaccccgtctctactaaaaatacaagaattagccaggcatgatggcacacacctgtaatcccagctactcaggaggctgaggaaggagaattgctcgagcccgggaggtggaggttgcagtgagcggagatcatgccactgcactccaggctggctgacagagggagactctgtctcagaaaaaaaaaaaaaaataggttttcagtctgggtaccggtggctcacacctgtaatcccagcactttgggaggccaaggcaggcagatcacttgaggtcaggagtttgagaactgcctggccaacatagtgaaaccttgtctctactagaaactacaaaaaattaactgggcattttgacgggtgcctataatcccagctactagggaggctgaggcaggagaattgcttgaacccgggaggcagaggactgcatctcaaaaaaaaaaaaaaaaaaaaggtttccagtccccctgtctcagaaattctgattctgcaggtttgaggtgtgaccaggaatctttatttttagaagacataccagataattctgataaatagccagtttagggatgtagtctaattttcctattttgcaagtaaggaaaataaggcccagagaggtaatgattttctcaaagtcacagaacaagttagtggcagaatttggactggaatgcagttcttaatgttctgtccagtgtttattctggtacagtatgtttgtagaaggtattacgtaagaaacattgttatatagatgttgagataggaagagtttacatttagaaatttggtctaaaatgcctgaacattcaagtcgtggaggagtattgaccaacttactcaatacaacataggagattcacattttgttacaaaaatgctgatttaaaaggagagttttcttttttttcttcttttttattttttgagatggagtcttgctctgtcacccaggctagagtgcagtgacacgatctcagctcactgcaacctccacctcctgggttcaagcggttctcctgcctcagcctcctgagtagctgggattacaggtgggggccaccacgcccagctaatttttgtatttttagtagagacagggtttcaccatgttggccaggccggtcttgaactcctgacctcaagtgatccacccaccactgcctcccaaagtgctgggattataggcgtgagccactgtgcccagcctgcttgtttttgtatcatatatatgcatcatcataatcatgcattatcaacctttgtatttctgtcaggacatagaaaccattagagtgcttggaagagagcctttttttttttctcgcatttaatgctttttttggtattcatttcataatcagcttaccaaaacattacctgcattataccccatcaaggtagaaatctttgtgttatcaatattggttactccctttccacaccgagtcatcagtaagtcctgttctatccaaataggtcatatgcatctagctcacccctcagtgctgttttgttttgaatttgtacatgtttactcctgatgccttgtagttatgatgatgtgttcttattttattctgtgcatacaagttctcagctcgctttttagggaaaatgaccatgtcttcctttcctataaattcctttctatctatcaagtcctcaacagagaataggtacccataaatatgtgattgttagtttctttgcctcagttgtagtctgatccttacagcttttaaacaacagtagagttcaccgtcaagaactaaggatggttggcaggcagatagaaaggtagcaagttgacccaactatctctggggaagtgggaacaaagaaaggttacatcagcactgtcatcacatagctctatagttctaggcctgcaggctcaatcaagtagccttgtataagattctctggaggaggtgctgaaagttgcttatacttgctatggaatttgattttacttcggatatctttttaccataggtacttctccctccaagccacacatcctcttggatttgatgatgttgtacgattagaaattgaatccaatatctgcagggaaggtgggccactccccaactgtttcacaactccattacgtcaggcctggacaaccatggagaaggtaacccagaacttcaaacgtatcaaactacaagaagttttattggtagaactcataaaatataaggtgggaaaaccaagcagaatagcacagtggaaattgaagcagtccagcaaagtgattaagagcagaggccttgagtctggcctggtatgtacagtcacgtgccacataacattttagtcaacagtggactgcgtgtacgatggtcctgtacgattataatggatcaaagctggtagtgcaataataacaaaagttagaaaaaataaattttaataagtaaaaaagaaaaaagaaaaactaaaaagataaaagaataaccaagaacaaaacaaaaaaaattataatggagctgaaaaatctctgttgcctcatatttactgtactatacttttaatcattattttagagtgctccttctacttactaagaaaacagttaactgtaaaacagcttcagacaggtccttcaggaggtttccagaaggaggcattgttatcaaaggagatgacggctccatgcgtgttactgcccctgaagaccttccagtgggacaagatgtggaggtgaaagaaagtgttattgatgatcctgaccctgtgtaggcttaggctaatgtgggtgtttgtcttagtttttaacaaacaaatttaaaaagaaaaaaaaaattaaaaatagaaaaaagcttataaaataaggatataatgaaaatatttttgtacagctgtatatgtttgtgttttaagctgttatgacaacagagtcaaaaagctaaaaaaagtaaaacagttaaaaagttacagtaagctaatttattattaaagaaaaaaattttaaataaatttagtgtagcctaagtgtacagtgtaagtctacagtagtgtacaataatgtgctaggccttcacattcacttaccactcactcgctgactcacccagagcaacttccagtcttgcaagctccattcatggtaagtgccctatacagatgtaccattttttatcttttatactgtatttttactgtgccttttctgtatttgtgtttaaatacacaaattcttaccattgcaatagtggcctacgatattcattatagtaacatgtgatacaggtttgtagcccaaaagcaataggttgtaccatatagccaaggggtgtagtaggccataccatctaggtttgtataagtacactctgtgatgttagcacaatggcaagcagcctaacggaaattctgtttattgattgattgattgattgattgattgagacagagtttcactccattgtccaggctggagtgcagttgcacagtcttggcacactgcaacttctgcctcccaggttcaaccaattatcctgcctcatcctcccaagtagctgggattacaggcaggcaccaccatacctggctaatttttgtattttagtagagacagggtttcaccattttggccaggctgttctcgaactcctgaccttaagtgatctgcctgctttggcctccgaaagtgctgggattacaggcatgagctaccatgcctgggcagtaactgaaattctctaatgccattttccttatctgtaaagtgacgataatatgcacgtttacctcaaagttactttgatgattaaagtaaggtaatgtatataaaatacatattaacatagtacctgacacatggtaagcatcaaaaaatgttaactacttttattactattattattacgtatttttaaataattagagagcagtatcaaaaattagctgggcgtagtggcatgcacctatagttccagctactcaggaggctgaagctggaggattgcatgagcctgggaattaaaggctgcagtgagccgtgttcatgcccctgcactccagccttggtgacagagcaagaccctgtcttgaacaattaaagaaggcattatgccgcaacgttagcttagaaatgatccacatatatcaccagtaactgtcaacaggattggaaccctagttttgggtattatgatcacaaggtattattaatagcttattaataataaagcgttggctaggcacggcgactcacatctgtaatcccagcactttgggaggccgaggtgggtggatcacctgaggtcaggagtttgagaccagcctgaccaacatggagaaaccccatctctactaaaaatacaaaattagccgggcgtggtggtgcatgcctgtaatcccagctacttaggaggctgaggcaggaaaatctcttgaacccgggaggcagaggttgcagtgagctgagatcgcaccattgcactccagcctgggcaacaagagcaaaactccgtctcaaaaatataattataataaataaataaaagtaaagtattgatgtttgtgaatgatttattcttctaatgaactagaggagatttttccaggaatttcagagccagtgaggttatgttgcttgtatgtgtcatgtgtatccaggtgaaaaaacttaattaaacgctattatataataccatacataaaaactgaattttaggaatactgaagaatgacatatagaagtcaaatcattaaatagctagtagtaaacagaatagagtgtcagctgttacccaatgatgataatattttcacgattaaaattaaaccttttctgattttaaaggaaaagttcagatctgtatcatataaagaatgtaaattttcagggtaataaaattaaaatgcagagagaaaaatgcaaaaatagttcttactagatgtgtgtatgtaaggaacttagactaattttaagaacactgtcaagaccctggtagttaggtaggaaaaaagacatgaatgattcattcaacaaaaactttgagtatttctgtgctagatggtagtgttacagtggtaaacaaaataaatgtgtttctgctatcctggagcttagtctacaaaaaaggtacatattggccgggcacggtggctcacgcctgtaatcctagcactttggaagatcgaggcgggtggatcacctgaggtcaggagttcaagaccagcttggccaacatggcgaaaccccgtctctactaaaaatacaaaaattaactgggtgtggtggcggacacctgtaatcccagctactcgggaggctgaggcaggagaatcacttgaacctgggagacagaggttccagtgagtcgagatcatgccactgcattccagcccgggggacaaaagcgaaaatacgtctcaaaaaaacaaaaacaaacaacaaaggcacgtattaaatacgaacataaatatttacaaattatactgaataagttctcatgtttattatttgcttgtccagttacaaacttttccttcgtagaattagaaatataaataataaacatgagaactcattcagtataattaataattattaaatgtaaataaaaacatctatgtacaattaggcatttatttaagaattatttgaaaaaaaaacaatgtggaaacagatattttgatatattgctagtgattgaaattgataatgttcttttgaagagtaaagtgaccatatatattaaagttaaaatttaactcagcaatcacacgcctggtgagttatcttaaggaaatcagtttgaaagtaaaatcaatatatgcacaaagactttaacatttatcataaaccagaaaaatcgagtttcaaattatatcctatggactattttctgctaaaaagtattaatatcaactttatgtaatactttcgtgacaaatattttgggggagaaaacccaacaaaattacatgcattgtaattttttttttttttttttttttagacagtcttgctccagcgtccaggctggagtgcagtggtgcaatctcggctcactgcaacctccatctcccaggttcaagcaattctcctgcctcaggcctcccgagtagctgggattacaggcgctcaccaccatgcctagctaatttttatagtttttagtagagatggggtttcatcatgttggccaggctggtcttgaactcctggtctcaagtgatccgtctgcctcggcctcctagagtgctgagattacaggtgtaagccactgcacccagccttatgcattataattttaatttgtaaactgtacaaagggataatacttgtagtacaacaagaagtaaaaacatttgttataggtagttaacatttgtaaccagtagaattataggtaaaatttatttatttaaaacagttttagttggatttgatttcaactttaaaataatgcttttcatctctatcaggtctttttgcctggctttttgtccagcaatctttattataaatatttgaatgatctcatccattcggttcgaggagatgaatttctgggcgggaacgtgtcgctgactgctcctggctctgttggccctcctgatgagtctcacccagggagttctgacagctctgcgtctcaggtattaactgattgcgtctgccattagggagaaaagcatacacatcctttccttcacatcccagtaacagatcctattatttgtaaattttaagttgtggaaaaaaaagataaaagccaggcacagtggcctgtgcctgtaatcccagcactttgggaggctgcggtgggcggatcacacgaggtcaggaattcgagaccagcctggccgacatggtgaaaccccatctctactaaaaatacaaaaattagccgggcatggtggcaggcacctgtaatcctagctacttgggaggctgaggcaggagaatcgcttgaacccaggaggcagaggttgcaatgaaccaaaatcacgccactgcactccagcctgggtgacaaagtgagactgtgtctcaaaaaaaaaaaaaaaagagagaaataaaattagcctacttactatcttctaatcaaagcatttgtggtaacttaaaatatactgtattgtaaagtatcatgctgtttcatttaggccattattctatttgaatctgtggctgtttctcttaataaatcaagtaatatggaatatattcatagcctctgaagagctctttatgtaagtatttatttaggatactttttgtaaaataagtgaatgaattcttaggtctcctttttttttcttttcttgagacagggtctcctcgctgcaacctggaaattctgggctcaaataatccacccaccacagcctcctgaatagctgggactagaggcatgcaccaccacgcctggctaatttgaaatttttttttggccaggcatgatggttcacgcctgtaatcccagcactttgggagaccgaggcaggcagatcacgaggtcgggagatggagaccagcctggccaacgtggtgaaaccccgtctctactaaaaatacaaaaattagctggttatggtggctcatgcctgtaatcccagctacttgggaggctgaggcaggagaatggcttcaaccagggagtcggaggttgcagtgagccgagatcacgccactgcactcctgcatggtgacagagtgagactccatctcaaaaaaaattttttttttaaatgatggagtcttgctgtgttgctcaggctggtcttgaacccctgacctcaaatgccgcctgcttcagcctaagtttcttttttttttgtaaagagacagggtcttgctatgttggccagggtagtctcaaactcctggcttcaagcagtcctcccaccttggcctctcaaagtgctgggattacaggcgtgaaccactacctataatgttgtgtttcactcaaggccttttgatttcgttttgcattaccgtgccacattgtgcatttccttgaccttttttgggttttttggagtgctttcatatgttaaaccatacctgattctcctcaaaatcacacaaagtagaatatcctaagacaagaaatctaaggaggcataaagaagttaactggttttattaaactcacacagtaaatgatagagccagaaatattccccttctagtgttcttcaccatcagcttaatgtagcataataattttctaattactgttgacaaataaataaccctttgaattttcaatactgggccttggataaattttcctaatttgtaagagagtattatcgtattgccatttacaaagctctcctgagtatctttttcttctgttaagtttacctaggagataaactgctgagtatggttgccattttggttttttgatataggttagaatgtcttggttttttttttttttttttttggtttttgttgttgtcattgtttgagacagcatcttgctctgtcgcccaggctggagtgcaatggcacgatcgtggctcactgcaacctccacctcccgggttcaagcaattctcctgcctcagcttcctgagtagctgggattacaggcatgtgcaaccacacctggctaatttttgtgtttttagtagagaaggggtttcaccatgttggtcaggctggtattgaactgctgacctcatgatccacctgcctcggcctcccaaagtgctgggattgcaggcatgagccactgcacctggctgaatgtcttgtttttgattaggcacttaagaaaggcctaggtactaaccataaaatatatttttataccttttgttgatactatatatatagaaaactgcacttatcataaccttagacaccttgaagaatgttcacaagcagaactaacccatgtgacccagcatccagatcaaaaacagcattatcagcccctctagaagccctcttgggccccttccattcactgtccttcttgtcaccagggtagctactatcctgacttttgatggcatagattagcattacctgttcttgtcattttataaataaaaccatactgtgtattcttttcttgtacagctttattgtgctaattcacatttacatcatacaattcagtggtttttatatggtcacagagttaggtaaccattaccacatcgattttagaacatttttttcactccagatagaaaccccctttacttaaactccaaatcccccactccaccagccctaggcagccactagtctactttttatctctatagagacaatagatttgcttattctggacatttcataaacatggaaccgtatattatgtggtcttttgttgccaactgtctttcacttagcatcatgtgttcaaaagagcatcatgttatccatgtttggcatgtatcagaattttattcctcattatggccaaatatcccattgcaaggatttatgacattttatttgaattgtaccctcctttctgccatttatcaataatgctactgtgaccatttgtgtacaagtttttgtgtggatacaggttttctttttgtttttaaatttgaggtggagtcttgctctgtcgcccaggctggagtgcagtggcacaatctcggctcactgcaacctctgtctcctgggttcaagcagttctcctgcctcagcctcccgagtatctgggactataggcacgcaccaccacgcccagctaattttttagtagagatggggtttcaccatgttggccagtctggtctcgaactcttgacctcaagtgatccacccatctcggcctcccaaagtgctgggattacaggggtgagccactatgcccggctgtggttttcatttcttttgttgtatatacataggagtagaattgctgagtcaagaggtaactcttaaacttattgaaaaactgccagattgttttccgaaaaggctgcaccattttgcaatcccaccagcagtgtatgagttttacagcttctccacatttcattggaacttattatctgtttggctgtttttaaaaatgatagtcattccaataagttctacttcagtgtggtttttgcacttctctgatgagtaatgatgttgagcatcttttcatttgcttattggcctttgttctagctttggaaaaatgtttattcaaatcctttggccatttttatttttatttttatttatttatttttttttgagaccaagtctcactctgtcagccaggctggagtacaatggtgtggtctcagctcactgcaacctccgcctcctgtgttcaagtgattctcctgcctcagcctcccgagtagctgggattacatttcaggcacctgccagcatgccgggctgatttttgtatttttactagtgacagggtttcaccatgttagccaggctggtcacaaactcctgacctcaggtgatctgcctgcctaggcttcccaaagtgctgggattacaggcgtgagccattgggcccagcctagattttcttttttctttttttttttgagaaggagtcttgctcttgttgcccaggctggagtgcaatggcacaatcttggctcactgcaacctctgcctcctgggttcaagcgattttcctgcctcagcctccccagtagctgggattacaggtgcctaccaccacacccagctaacttttgtattttttttagagacagggtttcaccatgttggccaggctggtctcaactcctgacctcaggtgatccacctgccttggcctcccgaagtgctgggattaccggcatgagctaccaggcccagccaattttctcattatattgcccaggctggtctcaaactcctgggttcaagtgatcctcctgccttggcctcccaaagtgtggggagtacaggcgtgagccaccttgctcagcccctttgcccatttttaaattagattgcctttttatattgagtttcaggagtcctttatatattctagataaatgtcccttatcaaattatattatttccaggtattttcttcattctgtgagttgtctttcctctaccttttaaaaaaggtgggtttttgtttgtttgtttgtttgtttttttaagataaggtctcattctgctgcccaggctggagtgcagtggcacaatcacagctcactgccacctcaacttcctgggccgaagtgatcctcttacttcagcctcctgaatagctagggccatagatacacactatcacacccagctttttttttctgtttgtagagacagatcttactgtgttgcccaagttggtctcaaactctaggctcaaagtgattctcccacctctgcctcccagagtgctgggattacaggtgtgagccacacgcaacctgtcttttcactattaatagtgtcttcctgcttcagcctcccgagtagctgggattacaggcacccaccaccatgcctggctaatttttttgcatttttagtagagacagtgtttcaccatgttcacccggctggtcttgaactcctgacctcaggtgattcacctgccatggcctcccaaagtgctgggattacaggcgtgagccactgcacccggccaaaatattgccttcttaacagtattgtcttctaatttgtgaacatggatgtatcttcatgtatttatgtgttctttcatttcagcagaattttgtagttttcagagtagaagcctttcacctccttgggtcatttattcctatgttttaagttcttttcgattccattataaatagaattgttttcttaatttcattttcagattgtttgatgagagagcatagaaatacaagtgatttttacatgttgatcttgcaacttcaactttgataaatctgattgttagctctaatagttttcttgtggattctttaggattttcaatatataagatcatgtcatttatggatagagatagttttttttctggctagaacttacagagcaatgatgagtagaagtggcagaagcaaaaatctttgtcttgtttcctatctgacagggaaagctttcagtttcatcatttaatatgatgttaggtgtgggttttcaataaatgccttttttcagattcaggaatttccctatcattcctgattttttaaggcttttttttttttttaaatcatgaaagggtgttgaatattgtcatgttctttctgtatcagtataaatgatcctatggattttgggttttattctgttgatgtgaaatattaattgattttcagatgttaaaccaaccttgcatacctgagatgaatctcacttggtcatggtgtataatcttttcaatatgctgctggattccatttactggtattttgttgaagattttgtatctgaacgcttaagataacatttacactctatcagaaatgaattgaccataaatgtgagagtgtatttgtgggttcttgattctcttccattccaaagatagacatacatccgtctgtatgtctgtctttatgccagtaccatactctcttgattactattgctttgtaataagttttgaaatcagaaagtataaatgagattttggtatctgagtaacagtcctcatagaattagttgggaaatattccctctttattctggtccctctttcttttttgtttaactgtgtatcttggagattgttccttctcaacacatgagagccgctttccctaccctcccacccctgctatagagaggtctataagtgtctgttcaattattttatttacttaacctattacttagtcggggacattaagcttgtttatgtcttttattttaaacaatgctgcagtgaataatcttgtatataagtcattttccatcaatataagtctctctgtaactgaatttttagaagtggaatttctaggtcaacctatggctctgtatttcacaaaaataccaattctggtttttcttgtggaggtggggagtaggaggtagaatgctggaggagaacttgctgtactcagctggctagtcattttagaaaggtttccttagcttctttttgtcatatggcctcaccaagaatcaaaaacattcctatttaccctgtaaacatggggctttactacccaagatacatatttctggatgtatgacagcttttcatattgaagaaataatgctgtgagtacagcacatttgttggaacttaggtcgttaagaatgtcttataaattcatacattatacattttattttattttattttttagtttttgatacagagtcttcctctgtcgcccaggccagcgtgcagtggtacaatcttggctcactgcgacctccatctcctgggctcaagtgattctcatgtctcagcctccagagtagctatggttacaggcatgcaccaccatgcccggctaatttttttatttttagtagaaactgggtttcaccatattgaccatgctggcctcgaactcttggcctcaagtgatcggcctgcctcagcctcccaaagtgctgggatccttgtattgggtaaaagatgaatattgagggctgcatggtggctcatacctgtaatcccagcactttctgagactgaggtgggaggagtcctggagcccaggagggtgaggctgcagtgagttgtgatcgcgccattgcacttcaacctaggaattataggcttcagtcactgtgcccggcatgtacattttaatattgtgctttcctcttttagctatagtatgaggttacatttcagagtcattgttgttaagcatcttaatagtgatgaggttgagtgaaagttacttctatttcaaacactgaagaaaattttgtacaaatctgtcacattccaagcccaggactgattgtttcatatacttctaattttacaatttctattgtagtccagtgtgaaaaaagccagtattaaaatactgaaaaattttgatgaagcgataattgtggatgcggcaagtctggatccagaatctttatatcaacggacatatgccgggtaagcttagctcatgcctagaatttttacaagtgtaaataactttgcatcttttaaattttttaattaaattttacatttttttctaatctattattatatgcccagaactttcacttagagtgtgcagtataatgtggtggttaagtataaaggctctggagtgacttcctgggttttaatcttggctctgccatttattggcagccgctaacctcttggtatctcagtttcttcatctgtaaaatgagaataataaagtgaaaagatgccaacatcatttactctgggctgcataactgatacttggaaaaagtattcctttgagtttaagaattaagttggttattcattttagcttgtaataaaaagatagtgattcataggatatgccacttactgaaatttaccacagatccaatcataaaatcactttctcttccctaaagatagcttgattaacatgtaaaggtgtgtaaaggcttgattacactaccctgatccgtaccccagttcccagcagcaccatgaaaaagggatttcaacatatttaattactttcagtagaaagtaacagtggtaggccaggcgcagtggctcacacctgtaatcccagcactttgggaggccgaggtgggcggatcacgaggtcaggagattgagaccatcctggctaacacgatgaaaccccgtctctactaaaaatacaaaaaattagccgggcatggtggcaggcacctgtagtcccagctacttgggaggctgagacaggagaatggcgtgagcccgggaggcggagcttgcagtgagcttagattgtgccactgcactccagcctgcgcagtggagcgagactcttgtctcaaaaaaaaagaaagtaacagtggtattgggagactgaggagcctagaaagtacttgaaggaagtaaaaggtttgtttgaccacattgtatttggaaagccagctttttcagctgtgtcagctttgtgtagtgatttttagttcttcttttagaaaataacggacaaggccgggcacggtggctcacgcctgtaatcccaccactttgggaggccgagacgggcggattacctgatctcaggagttcgagaccagcctgggcaacatggtgaaaccccgtctctactaaaatacaaaaagttagccgggcgtggtggcgtgtgcctgtagtcccagctactccggaggctgaggcaggagaattgcttgaacccgggaggcggaggttgcagtgagccaagatcacaccattgcactgcagcctgcgcgacagagtaagactctgtctcaaaaaataataataaaataaaaaagaatggacagtaaacctaaatgagttcattcccaaagatgatgttattcttaagggatggttcatttatttaagaccttacataaagtctatcaattgcgtgatttttcacttctgtaattgtgtgtatgtataatgtaaatatatatgtttttgttttgttttggttttttgagacggagtctcgctctgttgctcaggctggaatgcagtggtgcaatctcagctctctgcaacctctgtctcccaggttcaagcgtttcttctgcctcatcctcccaagtagctgggactacaggcacgtgccaccacgcccggctaattttttgtatttttagtagagatggggtttcaccgtgttagccaggatggtctcaatctcctgacctcgtgatccacccgccttggcttcccaaagtgttgctattacaggcatgagccaccacacccagcatgtattttttaaatgtataaaatgaagcagaaaagagaaatgataatttttcttcatcttgaaagattatcttcaccaggcgcagtggctcacacttgtaatcccagcactttgggaggcctcggcaggcggctcacttgagttcgaaaccagcctggccgacatggtgaaactccgtctctactaaaaataaataaataaagatggttttaatatatgttttagttttatgattttagcatctttctgaaatttttctcaaggcaagtaaatttgtatcagttggtatattggtacccatctatgaaataacttattaggaagatatctctaaaataagatcactttgcctaaaataaactgatatattgatgttcacagaatttttcttttaaccgacttgataaatgcattattcttgacgtcaagtgatccaccttcctcagcctcccaaagtgctgggattacacacatgagccaccgcacctggcattattcttataaaaggttaaatttctagttaagtttaatgtcctctttgttcatgtaccattgcttattttcttcccttcctactcacagtaatcattcttatggtatgcacttttgtttgcttatttttatgtaattgatattacgctccattctgtacgttgtactttcattcacagtgagttttggacattcctatgttcatctatacagacttacttcattttaactacactgtagtattccgtatgtaatatttactataactcatcactgtagcagagcatctcatagtgtatgtattactgttttgccattttggtatcaatgagtatttaagtcatttgcagtttttccctcttatacccagtattacagaggatctctttttatatgcttctttgtaccaagaggcagattaaaaaatttttttttgaaaaaatttttgaaaaaaaatgaaatgaagtctcactatgttgcccaggctggtctcaaactcctaggctcaagcaatccttccatcttggcctcccaaagtgctggggttacaggcatgagccaccatgcctggcctacattttaaattttgatagctcttacaatttactttgtaaagtatctgcatcattttatgttctcaccagtctttaataagaatacttcatacttttggctggacacagtggctcacgcctgtaatcccagcactttgggaggccgaggcgggcagatcaagagatcgagaccaccctggccaatatggtgaaaccctgtctctactaaaaatacaaaaattagctgggcgtggtggcgcacccgtagtcccagctactcgagaggctgagacaggagaatcacttgaacccgggaggtggaggttgcagtgaacttagatcacaccactgcactccagcctagcaacagagtgagactctgtctcaaaaaaaaaaaagaatacttcagacttaattttttttccagtcttaagtgtttgctaatgagattgagtttcttttggtatgtctcttgattgttcaggttttttcttttatgaattgactgttcatctctttttcacattatttctgttgggtgattttattagtgacttgttaaaattctgtatattttttcagcatgacacttcattattcaaaaaaaaaaaaagattctctatgtttctcgatactaatcattggttggtaataccttaaaaataagacccttactgtattttttgcttttttttttttttttttttttttttttttgagatagagtcttgctctgttgcccaggctggagtgcaatggtatgatctcggctctcagctcactgcaactgcaacctctacctccctgtttcaagcaattctcctgccttagcctcccaagtagctgggattacaggcatccaccaccacacccagctaatttttgtatttttagtagagacagggtttcaccatgttggccaggctggtctcaaactactggcctcaagtgatccgcctgcctcggcatcccaaagtactgggattacaggcatgagccacagtgcctagccactttttgctttttaactttgttttatagtactatagttttagtataaacagatgtatgtatacacacaactatggctttataatatgtttcagtcattgttagagcaaggcctaccttttgggtgcttcttttacaaaattgtcttggctattcttgtgccttttttcttatttgtgaattttagaattgtgaattacctgttgactcaccatgttttgtaaactgaggattttgaatggaattgcactcaattaaagattatcttgctttctgtgcagcaatgttttatttcaaataatccctactttaaattacttaggatagctataaattgtgtttctggctttctagatttagatgaaacgctttaaattgattgttttctcctaaatttaaaactgattgttagaagttaaagtcttctgttcattcttatttaggaagatgacatttggaagagtcagtgacttggggcaattcatccgagaatctgagcctgaacctgatgtaaggaaatcaaaaggtttgtggtgtttttatacttcatattaagcctttactcacattagtgattgactgtaagtcaaagaccacttaaggtttaaactgtttattttgtaaagtaaccactgtatctttcaccttgtgtttatagtcagaagtaagtacaagggcttcctgtagtcacatctttatgcaatctcctctgaatcaaaagttagtgaacttgctttgccactccagaaggcacatgaatatgaaaaagcattgtctattttcttatttaatggcaaaatacccgacctaagttggacttaatgtttgagaccgtttattttattaaattatattttttctcttttcttttttttttttgagacagttcttgctctgtcacccagaccggagtgcagtggtctgaccgcacctcactgcaacctctgcttcctaggttcaagcgattttcctgcctcatcctcctgagtagctgggactacaagtgcgcaccaccacacctggctaatttttgtatttttagcagagatgaggtttcaccacgttggctaggctggtctcatactcctgacctcaagcaatccatccgccttggcttcccaaagtgctgggattacaagtgtgagccaccatgcctggccttattaaattatttttattaaatttcctcaagattgatgaaagtaatgaaatataaaagtaatgaaatatatgtggaaaatagactggattaagaaaatgtggcacatatacaccatggatactatgcagccataaaaaaggatgagttcatgtcctttgtagggacatggatgaagctggaaaccatcattctgagcaaactgtctcaaggatagaaaaccaaacaccgcatgctctcactcataggtgggaattgaacaatgagaacacttggacacagggtggggaacatcacacgctggggcctgtcgtggggtggggggctgggggaggaatagcattaggagatatacctaatataaatgacgagttaatgggtgcagcacaccaacatggtacatgtatacatatgtaacaaagctgcacgttgtgcacatgtaccctagaacttaaagtataataaatttaaaaaaaataaatatatgtggaaaatattaataggtcaaaattcaaattgttcatttaatcagaagagtagtttagtcaaatccaagggttagacaacagaaatcttttttgtcaagtgcattctttgtgactgatttcattttcttcctggtttacacaggaagatttcagaaacaaatgtggatccgtgacagatggtatctagaagtttttagtttggttgaattgacagtattttattgagtaaaagatactaatttttgtaagaagaaaaattcaattttgataagtatgtttaagattaagagctattggccaggcgctgtggctcatgcctgtaatcctagcactttgggaagctggagcaggtgggtcacgaggtcaagagattgagaccatcctggccaacatggtgaaaccctgtctctactaaattagccaggcgtggtggcacatgcctgtgcacccgcctccgggtttaagcgatcctactgcctcaggctcctgagtagctgggattacaggcgccatggctaatttttgcatttttagtagagacagggtttcactacattggccaggctggtctggtctcaaactcctgacctcaggtgatctgcccgccttagcctcccaaagtgctgggattacaggcatgattcaccatgtctggccatttatcttattttcttttttttttttttttttgtttgagacggagtcttgctgtgtcgcccagagctggagtgcaatggtgcgatctcagctcactgcaacctctgcctcctgggttcaagcaattctcctgcctcagtcttccaagtagctgggattacaggcgcgtgccaccacatctagctaatttttgtatttttagtagagacagggtttcaccatgttggccaggctggtctcggaactcctgacctcgtaatctgcccacctcggcctcccaaagtgctgagattacaagtgtgagccactgtgcccagccatcttattttctttctttttttttgtcgggtgggagggggacagagtctagctctgtcgccaggcttggctcactgcaacctctgccccccaggttctagcaattattctgcctcagcctcccaagtagctgggattataggcacctgccaccacgcctggctaattttttgttatttttagtagagatggggttttgctatgttgaccatgctggcctcaagtgatccgcccaccttggcctcccaaagtactgggcttacaggcgtgagcttgtattgggtaaaagaacaatattgggggctgcatggtggttcatacctgtaatctgagcactttgtgagactgagatggaaggagtgttggagcccaggagggtgaggctgcggctgcagtgaattgtgatcacgccattgcacttccacctaggtaatggagcaagaccatgtctctaaaaaacaaaacacaatttttttaaggaatactgggaagaggtcagtggtggttttagaacagaggaagtgccagatgacctttgtgaggcattggccaggaagaactctacagtgtctttaggtagcttctgtccataaggataatggggtctcctccccagtattaatagaaaatctctgagctgtttttttttgtttgtttgttttgtttttttttcctgagatggagtctctctctgtcggccaggctggagtgctgtggcgcgatcttggctcactgcaagctctgcctcccaggttcacaccattctcctgcctcagcctcccaagtagctgggactacaggtgtccaccaccacgcccagctaattttttgttatttttagtagagatggggtttcaccatgtcagccaggatggtctcgatctcctgacctcgtgatccgctcgcctctgccttgcaaagtgctggagttacaggcgtgagccaccgtgcctggcctggtttttttgttgttgttatttatttatttatttatttattttttgagacagactctcgctctgtcgcccgggctggagtgtagtggcacgatgtcggctcactgcaagctctgcctgccaggttcaagccattctcctgcctcagcctcctgagtagcagggaccacaggcgctcgccaccacgcccggctaattttttgtatttttagaagagacggggtttcaccgcattagccaggatggtctcgatctcctgatgtcgtgatccgcccacctcggcctcccaaagtgctgggattacaggtgtgagccaccgtgcctggcctgatttttttttttttttaatctggtctcatacctctgacagctcatgaagaagtgctcctgcttcatatgtatatgtgttagcatagtgttaacatagcataggtgttcggtgtttgcagtttctgtttgttttatatgaattaaggtgtattatgagcagttgaagatatataggaaattttttcccaaaccactatctctgctcgttctattcattcagtctgtttatgttattccttcattcattcattttatagaacagtggagtgcctactgtatgcatctattgttctgggtcctggggaagaaaacaaagttcctgctttcatggaacttacattatattggcggagacagtaacagacaaacaaatgtagcctgtgtacatgtgttacatgaaaagcagggtagggggctgggagagagtagtagggagtgctattttcgaggtggttgtcaggaaaggcctcactgaggaggtggcattttgagtagacctgagcgcagcgggggcgtaagcccaggcagcatgtggaggaagagtgttcttggtgaaaggaacaaggatagaggcccgaagctagagagctcagcatgatcaaggaacagcaagccccgtgtggctggaatggagtgagcaaaggaatgagcagtagaaggtgagtgagttgggaggtcaccagagaccatggcaaggacttgaaagtgtcagggacacattggaagttggagcagggaaatgatgggatttatgttttgtttttgttttatgtttagtgtttttaagggattgctctatcagctatttggaaaatttagtgtagggcttcaagaagagaagcagagaaacaacattcttgccatagtcatagtctaagtaagggatgatggtggtgtggattaggctggtagtggaagaccagtccagttcgggttgtatttgaaggtagaggcaaaaagattatatttctaccagcaagcccatctatgaagttacttgtattattaatttaattgagacatgcccacataaactaataaataggaatttctgcagtttggttaaacacccctgtatatcctggttcttcttttagttgtccagatgtctctttaagtcaagtattttttggtggtgtaggagcctagagattgaatttattcacccaaaaggcatttgagtgattactatgtgccaggcactatgctgaatgccaaggatgtaaataagagggcgtagtctcagtctgttttactccagcttggttcctttttaatgaccctgacttgttaagcatatcagttatcctacagaatgtttaatcttctgtactttcctggttgtgttatttagcttatttctctttccttgacatttcttgtaaactggaagttacacctatagtcttgatgattcgtgttacacattttagattagaacacatcatgtgttgtatatggtgtttttgaaagcctctctgtatattggtctgtacattaaaatgttgcctgaatggatacacataaaatttaacagtgattacattagagatgagaagaaagaggtgccttttacttttcaatataccttttcctctgctttttgaactttcttgccctatgcatacgttattgcttaatcatccacctcatctcttcccctgtggctttctgttgcatttggaatgaaatctagcctctttgctgttacctgtggatgtcccttgctggcctctatcaccttactttgaaccactcctttcatggactgagctctcattggactatcttttattcttttgctgaagtttcttcactttgagtgcctctgcagttgctatttcatggctgtggcaagccctgccatggctttcatgcaaggatggttcctccttctcatctcaatattatctcttcagagagggaccttcccaactccgatgatctaaaatcctttgtatataccactcactaccacttctttcttttcttttccttttatcttttttttttttttttttttttgagatagggtcttgctctgttgcccaggctggaatcacgactcactgcagcctcatcttcttgggctcaaatgatcctctcacctcagcctctcgagtagctggaactgcaggcacacaccaccatacttggcttattattttactttttgtagagacagggtttcaccaaggctggtctcaagctcctgccgcaagcaatccacatctctcagcctcccaaagtattgggattataggagtgagccactactcctggcctattttcttattcactgtctaaaattatcttgttcatttatttacatacttgtttatagcttatttctcagctggacatggtgcctcacacctgtaatctcaatactttgggaggctgggttggagaattggttgagcccaggacttcaagaccagcctgggcaacaaagtgagaccctgtctataaaaaattgtttaaaaattagctgggcatggtggcacatgcctgtggtcccagctacttgggaggcagaggtgggagaatcgcttgggcccaggaggttgaggcgacggtgagccatgattgtgccactgcactctagcctagtgacagagtgagaccatgtgtctaaaaagtaaataaaaatagtttctctttcatgactagaatattacctctatgtgggcagggagtttgtctatactatttggcactatatttcctgattctgaaattatgcctagcacatggtaagtactccttaaatatttattgactgaattatttaatacttaagaatttcatttgggattatctgagtggtaagattacggattatatttatgtaagaaaaaatcattttttaaacttggttgccctttgccacactgacatagacactaagttttcttagccagattacttccgaggatactcacagaggccattctcttctcaatccccaaataattgatatttcttagcactttcaagctaatgcaattcttagatgatgtatctgtgtatatcatatcctcattctacaaatgtagaaattgaagtctgggcacagtggctctcacctgtaatctcagcagtttgggaggccaaggcgagcggatcactgaggacaagagttaagaccagcctggccaacatggtaaagccttgcctctattaaaaatacaacaattagggccgggcgtggtggctcacgcctataatcccagcacgttgggaggccaaggcaggcagatcacgaggtcaggagttcgagaccatcctggctaacacagtgaaaccccatctctactaaaaatacaaaaaattagccaggcatggtggcacgcgcttgtagtcccagctatcgggaggctgaggcaggtgaatcccttgaacccgggaggcggaggttgcaatgagctgagattgcaccgctgaactccagcctggtcaacagagggagactctgtctcaaaaaaaaaaaaaaaaaacaattagccaggcgtggtggcgggtacgagtacctgtaatcccagctactagggaggctgagggaggagaatcacttaaacccaggaggtggagtttgcagcgggctgataatgcaccactacattccagcctgggcaacagagtgagactctgtcttaaaaaaaaaaaaaagaaagaaagaaattgaggaatgtggagattgtggtctgtgatttgttaggaatcacacagcaggttagtagcaactacagggctttggttcagaataccaccttgacaatggtttgtttacagttcggctccccttcctctgcctttctctccttccttattgagggcagctggaaagaattttcatcatttactagcctatagctttaatttgagttttgaaaccttgataatagagcacagaggaaaagactgagttttctttttttgagacagtcttgctctatggcccaggctggagtgcagtgacaccatctcagctggttgcaacctctgcctcccaggttcaagcaattctgcctcagcctctcgagtagctgagattacaggcacgtgtcaccacgcccagctaattttctgtttttgtttcgttttgtttttttctgagatggagtcttgctctgtcacccaggctggagtgcagtggtgcgatgttggctcactcaaacctctgtctcctgggttcaagcaattcttctgcctcagcctccccagtagctgggactacaggtacgtgccaccatccctagttcatttttgtatgtttagtagagatggggtttcactatgttgaccaggctggtctcgaactcctgatctcaggtgatctactcgtctcagtttcccaaagtgctgggattattggcacacgcctatttttgtatttttagtagagacggggtttcaccatgttggttagactggtctcaaacttctgacctcaagtgatttgcccgccccagcctcccaaagtgctgggattacaggcgtgagccaccgtgcccagccaagattgagttttgaaaagagccttctgagattatgagaagggcaagcaagataacttaagaagttacattaaaatcatctaagagacagtgtaacaagaaggaattgtaaaatgatgttatgagcacgtgcccaatgtagtggcaatcccttgtgcttcgatacattggtgggagacaaaactgtacttaaattgataaatcccttacatgtcattttaaggagcttagactgactcccatcatgtagacatcagagatttcttttttttttttttttttttttttttttttttttgtgacagagttttgctcttgttgccgaggctggagtgcaatggcgtgatctcggctcaccacaacctccacctcccaggttcaagcaattctcctgcctcagcctcccgagtagctgggattacagccatgcaccaccacgcctggctaattttgtatttttagtagagacggggtttctccatgttgtggctggtctcgaactcctgacctcaggtgatcctcccgcctcagccacccaaagttctgaaattacaggcgtgagccaccgcgcccagcccagagatttctaaacagagttctaaccagatgcttttccctgtcagtagaatgagaatgaattggaggtgggagagactggcatgagggacaccagtcagccagtggaattagctggtaatgttgataggagaagaaaaagattcaaagttaggtagtggtagcaagaattagagggaaggtcggatttatgatatgtccaaggttgaattctaaggtgaaatttggtggcagatttcatgtgtaaattgggaaggtagattgagtttttttaacatgggttttctaacatgtcaatagagtgactctgcaggggggcctgacgagagaacagtgcatggggtgattcaacagccagttgagccttcatgcagagcatttaacactgtgactctgtagactctggttggcagtaaaatttcattaaaccaatatttaaacccttaggtaataataaaaattgagggaaaaggatccaggttttgtattttttatgaattcagttattgaattaaacaggaccttgcctcaagaaataatctaccaacaattaacttgttttaaagcaaagttaggaagtgagcatgttcaaattattaaataaaaaagtaagctgtgtatttcattcatagaaatagaggctggcctacttcggatgattctcagcatgtgattacagatgtgggcttatacatcctagggagttaaggcgtactctggcttggatagagtagagctctttgaaactcttctctcacccagctagtttatatagactagagaactagaatgtagcagcatactctgtcttagaagcccttttatataggagctggtctggaaggtttgaaaacataacaaatgtgttggtgtctcccaatgtattgctagattcttacccaagagcattatcctggttagggtttggtttggttttgttttgttttttaatgtttgccacaaactaacactagatgttagttctttcatcaagtgaggagagtagaagaaaagtccagaactctgaaacaccttttcaaaagtttttcaagccatgatgtttgcaagttaaatgctctgttatgtaagcaatataatcagtttttattaatgtaacattccttagtgttttggggtatcacacaaaaaagaatatccatatctggaagcaacagcttttaaataagagcattgtggtggtggtggtgatagtggtttttttttttttttttgagttggagtctcgctctgttgcccaggttggagtgcagtggcacgatctcagctcgcttcaacctctgctcccaggttcaagcaattcttctgcctcagcctcctgagtagctgggattataggcacctgctaccatgcctggctgatttttattattttagtagagacaggtttcaccatgttggccaggctggtcttgaactcttaacctcaggtgaatcacccacctcggcctcccaaagtgctggaattacaggcatgaaccaccatggccagccaaataagagcatttttaatgtaaaattatgcatgaaatgtacattcaattttgtctttgtttactaggatccatgttctcacaagctatgaagaaatgggtgcaaggaaatactgatgaggtaaatcctacctttaggataaaaagatttctgtttataagtgccaccctcatgtaagtgaggtttaaaattttccttttctttaggtcccatgtttaagcagcatggcacatttatgttctcttacccagaatgtaccaagaaagggtggtcccttcttaacatctaacaattgcctggtagtagcagtgaaggtatcttcagtcagaggctaggaccactgaaggatatacatgcattcaagtttccatcagccagcaggcatcagtaatcagtgtgtagatcaaaagctcaaatgtttccttccccactggcagttttacttcaagtagtggaggcttgcttttttaatagttaattaagtacattgagagatgggaggtgaaaaaaggaaaatgttttattttgaccatctaatatgaaagtagttcggtgttaggtatccagtagttgacactggaagacagggaatgacatgttaatattcatagccagagggtggcccaggttttttcgtacatgggaatgaaattcttatccaaataagtagaaattatgtgcgtaagccatttgttaagagcactgagtatgtgcatctcgatccatctaatgaataaccattatcaccagtttaaattattttctttaggcccaggaagagctagcttggaagattgctaaaatgatagtcagtgacattatgcagcaggctcagtatgatcaaccgttagagaaatctacaaaggtaaggatgacttcgttttgtgtaaactaaaaagtattattttccaggtgtaaaaataaaaaagaacataaggggtttctttgcctttgaaggattaactgctgtggggattaccttcttatcataagcaactagaaaattgacaaactaaatgaaacaactgtttgcatatattggacaatgggcaatacagggaaaccatggaaaccaaacagagcccagtagtcttgctgaacgaaagagttaaatatcaaagttcaggccaggtgcagtggctcacgcctgtaatcccagcactttgggaggccaaggcgggtgaatcacttgaggtcaggagttcaagaccagcctggccaacatggtgaaaccctgtcttagccgggtgtggtggcaggcacctgtaatcccaactatttgggaggctgaggcaggagaatcgcttgaaccagggaggcggaggttgcagtgagccgagatcacaccactgcactccagcctgggcgacgagcgaaaccccatttcaaaaaaaaaatcaaagttcagagagctcaatttgagtagaagttgtaggataaggtagcagaaaagaggaagctgcccagaaagaaagccgtagagatatttagagagattcccatggatccttggcctaggagtgatctgtatatgtgtggggtgaaaacgcatgtgtccaggtagagaaccccccagaaattagtaggctgaatgattgctggaacatagggctaagaaaagttcatggccagaaggatctggccagagtagagagacttagtaatacacaaggcattgggtagtgtcttcacagaggttatgccttactactgaagataaattagtcctagagtacaagcacctgaaccaagtttcaaagcaaatttttaaagggtcaaattacctaacaactgcatgccaaaacaaaggcctaaccctctttacagtaacacaacaaaattcagcacttcacagtgtaaagttagaatgtctgacgtccaggctgggcgcagtggctcatgcctgtaatcccagcactttgggaggccgaggcaggtagatgacctgaggtcaggagttcaagaccagcctggctaacatggtgcaaccccgtctctattaaaaatacaaaaacttagccaggcatggtggccggcacctgtgatcccggctacttgggaggctgaggcaggagaattgcctgaacccaggaggtgaaggttgcagtgagccgagatcgcaccactgcactctggtctgggcaaaaagagcaaaactcaggctcaaaaaaaaaaaagaatgtctgacgtcaatcacaaattaccaagcatgacatgaagttgacctataaccaggagaaaactcaatctatagaaacagacccagatgtgagaaagatgatgaatttagcagacaaagaccatcaagtggctattttaaatattaaaaatatgttcaagtggccaggtgcagtggctcatgcctgtaatcccagcactttgggaggccaaggtgggtaggagttcaagaccagcttggccaatatggtgaaaccccttctctactaaaaatacaaaaaaattagctgggcatggtggcaggtgcctatagtcccagctatatgggaggctgaggcacaagaatcacttgaacccgggaggtggaggttgaggttgcagtaagccgagattgtgccacttgtactccagcctggacaacagagtgagactctgtctcaaaaaaaaaaaaaaaaaagttaaagaaaacaagagtataatgagaaaaatgcaaaatagttttaaaagaaccaaatggaatttcttaaaataaaaaataccagaaatgggggccgggcgtggtagctcacgtctataatcccagcactttgtgggggctgaggcaggcagatcacctgagatcggtagttcaaggccagcctgaccaacatggagaaacctcatctctactaaaaatacaaaattagctgggcgtggtggcgcattgcctgtaatcccagctacttgggaggctgaggcaggagaattgcttgaacccgggaggcagaggttgcggtgagctgagattgcaccagtgcactccagcttgggccacaagagtgaaactccgtctcaaaaaaaaaacaaaaaaaaacagtagactcgaagaactagctgagtttttctttactttaggcagtaagtgtgaccttttgcaggtgactactttagttcctcatgtcctcattagtagatcagagaaattcgacaccaaaaccccaaaagaaaaaccccttctaatcctcattccatgattttatgaatgcatgaagtcctaggcctgcgaaggaatactcattctctttatcctgtgttgatacctctctgcttcaacctccaactcgacatttgcctataggatgtacttggacattcagcataaactacctcacaccattactgaattgcttcatgtgcacatgtcccatgccacaataccggggaccttgtcttccgtgatatttgtccgcagtgctgtgactacaggagggagtcagtgaatgtctgcatgtgtgtctttaccatccctcttgaatatgctctagggttaattcctagaagtagaattactctattgaaaattggcaatatttttcattctaatatctattgccaacatgggaaagcaagtctggatgccagtccttgttatatgccccttgggtaagttacgtaacctctttaagcttctgttcactcatattttaacaaggaaaattacaatattttacctcacaaaattgtagtcagcttctggctgtcttaaactctggtatatagtaaacactaagtgttggtgtccatccttaatttgtaataataggtcacttgttagagaaatgcaccttaccattttcttttcttttcttttttcagttatgactcaaaacttgagataaaggaaatctgcttgtgaaaaataagagaacttttttcccttggttggattcttcaacacagccaatgaaaacagcactatatttctgatctgtcactgttgtttccaggagagaatgggagacaatcctagacttccaccataatgcagttacctgtaggcataattgatgcacatgatgttcacacagtgagagtcttaaagatacaaaatggtattgtttacattactagaaaattattagttttccaatggcaataacccatttatgagagtgttttagcctactggaatagacagggaccacatcctctgggaagcagataagcatagaactgatacttgatgcacactcgtagtggtaactcatccctaatcagcattgtaaagcaggtgccagaggtggtttgctttgtccttccaaagcaggtgagtcagccccaccgagagccaggcagctttgagtggcagcgtggtgctagcagcttcagcggaacagggtgagagttaattatgcagtcttcttgacagcggcattaatttggaaggaaactgacaagtcatgggtcaagtttcagtgacttcctccttcctctgatggcagtatatagttttcacattttaattcctcctcctgagatgcactatacttaaaaccattctctcccctgctaacagaagggtgtgaatctggtttactttgagcattaggatttgcccctttggaattctgcactccagttacttaactttcccttcagaatacatgtggaaagaaagaaagaaatagcgatgactccacttttgcccctgtggcaccttgaacaaagcagttcttcccaaattatactttttttttttttaaataaggtgagcaggatgactggggagagagaaacatttgactttgactgcctcccccattctttgctgtgagctggaaagtgtgcagttggtcgtctttcttctcctttctttaggatagtaagagactcactcactgcacttctgctcagttggcttctgcatcgggatcacacagccatcagcaggactgcccagttggtgagcacactccattgaccacgtggcgccagcgcttcctcaatgcacatgattgagaggaaagaaagttctcttagatgttactgcttttgctcagactttgcaaaaaaaaaaatatatatatatatgtataaatatataattattaatcacttttgtccttgagaaagtcttgaatgaacagagaatttattccattgcaatatttgattgtatagaggcacactgtttcatcgacagaagaagcaaaaaggctttgtgtaagtttttggtactatgtaccacctctgttattcttttaaagctgaagtattcatgtacttaaaccatattatatttaattgtgtttgattttaaaatatatatatatgaattctatttaaaattgtgtcaactttctgctttcagggcatttatggctcttctgttgaaatatattgatctttccaaatattttcatttgctttctaaaaacccagaacatgagccactactggactttgccttgtgtttgaagtgtatggcataaacccaaggtttttattagtcatctatgctgtgattaattcattttgttcttttaacaaaatatttccatccacttcacattgcttcaatctttaacagaaaagcaatataaaggttatagaataaaatgtggttttgggcaactcttgctgcctctgcatgttttggaataacaatttctacaagactctaggctgtttaaactagtgctttcagttaagataaattctaatcatttctttgtatatacattttgtgcttctgagctagagatgccaagtagttgtaaactgcttataaagagaatagcagcaaatttgagactcggctacttttttctgccccacctgctttgagacacagaagcggagtgtggcccgaaattattagccagatttaatatttgatctaaagtaggtccttgtactcattttaaagttggaatttgattcctccaacattgagcacccaccatgttccaggctctgtgcattgtgcccacaaaataagattccctggtggagtttttatgggttcaaataatcagttgaacacccttcatctttatcatgttgttgacattgacacaaattgtttaaaaagaaaagatattagagagaaagtggtacctttgtaacttgatgtgtcttcatcattcggtaagatttgatgaaagtaaaaagcaaatgtcagccaaatccagtgaacagcaataaaacagggagtaactttttataactttttctacttggatttcaacattcagtagagcttttcgaaatgtaagtagtttacagtactggaggtttgactagttcagtaggaatttggaggggaaggtcattctgaattgtaacaaagtacaaacttctttgctgttttatttaagtactgagagctaagcacctgatgaagtgactgacctctctccagtgacagtgtttgggtacctgcctgacttcaggagtggggtttatgtttctacacagtgaccttttctctcgccctctcctccctcttgcccacacaccagttgattggacctgggttgaactcctgatccagacaggcccaagacagttcttaatgttaagaattttggggccgggcacggtggctcatgcctgtaattgcaacactttgggaggccgagacaggcggatcacttgaggtcaggggttcgaggccagcctggccaacatggtgaaaccctgtctttactaaaaatacaaaaattagctgggcatggtggcgcacgcctgtaatcccagctacgtgggtggctgagacaggggaatcgcttgaacctggaggcggaggttgtgcaatgagccgagaccgtgtcactgcattccagcctgggtgacagagggagactctgtctccaaaaataaaaataagaaaaagaattttgggctaggtgcagtggctcacgcctgtaattacagcattttggaaggcccaagatgggcagatcacttgaggacaggagttcgagaccagcctggacaacatggtgaaactccatctctactaaaaagacaaaagttagccagatgtggtgatgggcacctataatcctagctcctcgggaggctggggcaggagaatcacttgaacccaggaagcagagattgcagtgagccaagatcacatctctgcactccagcctgggcaacagagcaagactctgtctcaaaaaaaaaagaatttggccaggcgcagtggttcacgcctgtaatcccagcactttgggaggccaaggcaggcagatcacgaggtcaggagatcgagattgtcctggctaacatggtgaaaccctgtctctactaaaaatacaaaacattagccgggtgtggtggtgggcacctgtagtcccagctactagggaggctgaggcagaggaaggatgtgaacccaggaggcggagcttgcagtaagccaagatcgtgccactgcactacagtctgggcgacagagtgagactccgtctcaaaaaaaaaaagaattttggccgggtgcggtggcacatgcctgtagtcccagcactttgggagaccaaagtgggcggattacctgaggtcaggagttcaagaccagtccggccaatatggcgaaaccctgtctcttactaaaaaaaatacaaaaattagccaggtgtggtggcgggcacctggggaggctgaggcagggagaaatgcttgaaccggggaggcagaggttgcagtaagccaagatcgtgccactgcactccagagcaagactctttctcaaaaaaaaaaaaaaaagaattttgcatggggaaggagagatactgttcaccatctggaatggtgcttggatgtggcacttacaaaatcaggagccagcactgcatggacaaacagaagcatgtgggcctgagatagcaggtaccttgataaccctgaagacatccttggtttctgcatctattcctgcatccttgcattggactacattaatctgtcagttatccttataatgatttttgattttttttttttgagatggagtttcgctcttgttgcccaggctggagtgcaatggcacgatctcggctcaccacaacctccacctcccaggttcaagtgattctgctgcctcagcctcctgagtaactgggattacaggcatgcgccaccacacctggctaattttgtatttttagtagagacggggtttctccatgttggtcaggctggtctcgaactcccaacctcaggtgatcaccctgtctcggcctcccaaagtgctgggattacaggcgtaagccatggtacccggtctgttttttgattttttgaaaccagtctgaagtgagtttttttaattacgtgaaaggagtttggctaaaatactgccatactgccctaatgcctaatgattatgtattctcagcatgtctgcaaagtactgctgatttctggagaataatttttctttagtaaacttcacttaagtcgtcatgtgtattctctcaaaatggtatcctaacctaatggagctaaaagacaccccttgtttttataacaagcagttactgaggcccaggaaggggagaagtccctggcttgtgagatgatcaccattagaactcaggcctgggccagtgccttttcatgcttctcagatccttccaaagaataatgaagattataaccgcttttagcaattgtaataaacccagaaatagaaagctttttggttagagtactggtagaagtttggcgggagagataatttttacaaaatttgtaaatacctgccaattctatatactaggcaaggtctctggccttgtaaaacccctcaaggttacaactttggtggcccacactaatagttacccactgaggccctctccgggtgaacattgagcactagaggaagcccctctgcttgggcaggactgggcgtggtgcagagtaggagcggtgatactgtggattctgggcaggtggagatggccagtgatgtccaataaaggacactggagggagcagtgtgagtaaaggccctgagggcattcatgttcagggagggttgctgcccactggcttgcttggcacacaggagagtgggtattcctgccttagtaactttatgtaaacaagtatttcctcagtctgttcctctcaaactgcctgctctggcacattcagaatgtcacagaactcacctggatgcattcagccccttgcctaaaggtgacagtgcatctccttccccaccccacccctcataccactgaagcacctgtcagactggcccagtctgtgggcaaggagcctagagagggcttagtttcagcttgaaaggagctgggatttaccaagaagcaaatgagagacgaggattgcaacaactgtgccatttccccagcttcagctgactcctgtatattgactgtgccttcagactcatccgtaagtgaccccaggctggcctctcccacatcacagtaagaattccacacaccatacaacttggaaagaggctccagctgaaggaagccccacacttctttcaagtttttcttagtcttctcttcttggcaaagagtaccttttgtttcttctaattatgtaactattggtttagtaaatattcacccattcagtcaccctgtaagtggcaggcactgtttacagggacacaggaaggaataaaaacttgcaggcaccttggagcttgcattctattgaagaggtaatggaagttgggatagcagctaaactatgctggtattggccaggcgcagtggctcacacctgtaatcccagcactttggaggccaaggtgggcagatcatgaagtcaggagatcgagaccatcctggctaacatggtgaaaccccgtctctactaaaagtaaaaaaaaaaattagccaggtgtggtggcgggcgcctgtagtcccagctacttgggaggctgaggcaggagaatggtgtgaacccaggaggcgaagattgcagtgagccgagatggcaccactgcactccagcctgggtgacagagcgagactctgtctcagaaaaaaaaaatatgctggtagttttgattcaagatggcctttggagcccatgatttaggtctcgtacccaccaaggtctactggaaaacatcaggctctcctgctatagacccatagggagagctgcagccgagagggggagctgaagagaagtgccccttctgtgtcctgtcagcctcatccttccgcaaggaccagttgctgtgccactccattcacttgctgcaagactggaggtttttcctcaggtgttgagcacctggtttacaagatgtcagcatcttgatgcctgagaccatcaaggcaagtctctgaacagggcttaccttagagtaaggcttagaagaggccgtaaagtcagtctcagctccgtggctctgcagagctttgggacatgtgaattcttaaaaacaagactattgtacagttactatatgcatgcagtataaaattataaccttggaaaatcctagctagctgttgagctaattccataaagtaatcagctcctgagttctgcagtggtaataataatcagcataatgagtaaacactgtgtgtgccaggcagcgtctcatttgatccttgtgataatcttgtaagtactgattttctcccttctttaaacaaagttttttttttttttttagagagggtctcactatgttgcccaggctagtcttgaattc

SEQ ID NO: 15 - DNA, 18 bp, Artificial Sequence
  Description of Artificial Sequence: Synthetic primer
actgagcctgctgcataa

SEQ ID NO: 16 - DNA, 16 bp, Artificial Sequence
  Description of Artificial Sequence: Synthetic primer
ggcgcacgcctccacg

SEQ ID NO: 17 - DNA, 162025 bp, Homo sapiens
  Nucleotide sequence of chromosome 17 containing the genomic sequence of the predominate allele of the AKAP10 gene
gaattcctatttcaaaagaaacaaatgggccaagtatggtggctcatacctgtaatcccagcactttgggaggccgaggtgagtgggtcacttgaggtcaggagttccaggccagtctggccaacatggtgaaacactgtctctactaaaaatacaaaaattagccgggcgtggtggcgggcacctgtaatcccagctactcaggaggctgaggcaggagaattgcttgaacctgggagatggaggttgcagtgagccgagatcgcgccactgctctccagcctgggtggcagagtgagactctgtctcaaaaagaaacaaagaaataaatgaaacaattttgttcacatatatttcacaaatttgaaatgttaaaggtattatggtcactgatatcctgtttcattctttatataatcattaagtttgaaatgtatacttgcactactaacacagtagttaatcttagtcctacaagttactgcttttacacaatatattttcgtaatatgtatgcactggtgtttatgtacgtgtttatgtttatatctgttaaaattagcagtttccatctttttctattttgtaccatcacatcagttcagaaggattgacagagcaaaatgatttgatgaagtataaaagtcacatggtgagtggcataaatacaactctgaacaattaggaggctcactattgactggaactaaactgcaagccagaaagacacatatcctatatgtcaagagatgtaccacccaggcagttaaagaagggaagtacacatagaaagcacaatggtgaataattaaaaaattggaatttatcagacactggattcatttgctcctaaagtcagagtcctctattgtttttttgtttttgtgggtttctttttaaatttttttattttttgtagagtcggagtctcactgtgttacccgggctggtctagaactcctggcctcaaacaaacctcctgcctcagcttcccaaagcattgggattacagacatgagccactgagcccagcccagacgctttagcatttatgaagcttctgaaatagttgtagaaaccgcataagctttccatgtcactttcaaagtttgatggtctctttagtaaaccaaccaagttattcctcaagggcaaaataacatttctcagtgcaaaactgatgcacttcattaccaaaaggaaaagaccacaactatagaggcgtcattgaaagctgcactcttcagaggccaaaaaaaaaggtacaaacacatactaatggaacattctttagaagagccccaaagttaatgataaacattttcatcaaagagaaaagagaacaaggtgttagcaaattcctctatcaaataacactaaacatcaaggaacatcaatggcatgccatgtggaagaggaagtgctagctcatgtacaaaccagtagataatttcaacttgctgccgaatgaaacctctttgcaaggtatgaatcagcacttctcatgtttgttttgctttgttttgttttgtttttagagacaggcccttgctctgtcacacaggctggagtgcagtggcacgatcagagctcactgcaacctgaaactcctgggctcaagggatcctcctgccttagcctcccaagtagctgggactacaggcccaccatgcccagctaattttttaaattttctatagagatgggatctcactagcacctttcatgtttgatgttcatatacaacgaccaaggtacaatgtggaaaagggtctcagggatctaaagtgaaggaggaccagaaagaaaaggggttgctacatagagtagaagaagttgcacttcatgccagtctacaacactgctgttttcctcagagcagagttgatgatctaaatcaggggtccccaacccccagttcatagcctgttaggaaccgggccacacagcaggaggtgagcaataggcaagcgagcattaccacctgggcttcacctcccgtcagatcagtgatgtcattagattctcataggaccatgaaccctattgtgaactgagcatgcaagggatgtaggttttccgctctttatgagactctaatgccggaagatctgtcactgtcttccatcaccctgagatgggaacatctagttgcaggaaaacaacctcagggctcccattgattctatattacagtgagttgtatcattatttcattctatattacaatgtaataataatagaaataaaggcacaataggccaggcgtggtggctcacacctgtaatcccagcacttcgggaggccaaggcaggcggatcacgaggtcaggagatcgagaccatcctggctaaaacggtgaaaccccgtctactaaaaattcaaaaaaaaattagccgggtgtggtggtgggcacctgtagtcccagctactcgagaggctgaggcaggagaatggtgtgaacctgggaggcagagcttgaggtaagccgagatcacgccactgcactccagcctgggcgacagagcgatactctgtctcaaaaaaaaaaaaaaaaaaaaaagaaataaagtgaacaataaatgtaatgtggctgaatcattccaaaacaatccccccaccccagttcacggaaaaattctcccacaaaaccagtccctggtgccaaaaaggttggggaccgctaatctaaataatctaatcttcattcaatgctaaaaaatgaataaacttttttttaaatacacggtctcactttgttgcccaggctggagtacggtggcatgatcacagctcactgtagcctcaatcacccaggccccagcgatcctcccacctaaacttcctgagtagctgggactacaggcacgcaccaccatgcccagctaatttttaaattttttatagagatgggggtctcaccatgttgcccagactggtctcaaaccctgggctcaagtgatcctccctcaaactcctggactcaagtgatcctccttccttggcctcccaaagtgctgggattacaagcatgagccactgtacccagctggataaacattttaagtcgcactacagtcatggacaatcaggcttttcaacatgcagtatggacagtgagtcccagggtctgcttttccatactgaaatacatgtgatactaaggagaaaggtgctcgcaaggatatttaaaatgaagaatatttaaaatgaggaaaaaactgtttcttcatgactttgataaggctgataaagaccatttctgtgatctcaggtgattcactcaagtagtatatttcagtaatcattatctggaacagcctgaatcttaaccaaaataccatgattttttaatgctgttatgataccttgatgatatgaccaaactgcaatgtaggcagctaaatctccacgagtttgacttccccgagagttgacagttttcttcacaaattaaagaaatatattttttgatacatgattggcatatttaaaaactacactgaaatgctgcaaaatgatataaagaaacattttccagaatcaaatgcaatcaaagagtggattaggaatctactcaccattatcaactaaatagaaacacttggactgggtgtggtggctcacatctgtaatctcagcactttgggaggccaaggcaggtggattgcttgaggccaggagctcaagaccagcctgagcaacatagcaaaactctgtctctacaaaaaaaaaaaaaaattaaccaggcatggtggcagatgcttgtaatcccagctactctggaagctgaagtaggaggactgcttgagcccaggagatcaagactgcagtgagccgtggtcatgctgcgccacagcctgagtgacagagagagaccctgtctcaaaaacaaaaacaaacaaaaaacacttaaccttcctgttttttgctgttgttgttgttgtttgtttgttttgagatggagtctcactctgttgcccaggctggagtgcagtggcgtgatcttggctcactgcaagctctgcctcccgggttcacgccattctcctgcctcagcctcccgagtagctgggactataggcgcccgccaccacgcccggctacttttttgcatttttagtagagatggggtttcaccgtgttagccaggatggtcttgatctcctgacctcgtgatccacctgcctcggcctcccaaagtgctgggattacaggcatgagccaccgcacccggccaacctttctgttttttagtttgatatgcttgttaactcagcagctgaaagaatgctgaaagtggccttcagtaaaaaaatttcactagaatctctacatccatatttaatctgaatgcatatccagattgatcagttagagcaaaaacactcatcatcattcctgatgacctctaattctggtttcggctttctatttcaatggaaacagaataaggaaagaaatggaagggctctggaaatttgtcctgggctatagatactatcaaagatcaccaacaataagatctctcctataaatataaaacaagtataattaattttttaattatttttttctcttcagaggattttatttcaagataaaacataacttctacccatactattgattccaaaggttagaaaaagtgtttttcctcatcttatccttcaaagaggtcacagcaatgcaaacatctataaaatgcctctgcataattgtcagaagctatagtccagaaatcattgaaaatgcttttccattttaagcttaggtgaggtgtcttaggaaacctctatgacaacttactctatttattgggaggtaaactcccagactctcccagggtctcctgtattgatctcattttttaggcttcctaatcccttgaagcacaatcgaaaaagccctggatctcttttctgcacatatcatcgcggaattcattcggcttccagcaagctgacactccatgatacaagcggcctcgcccttctccggacgccagtccttgctgcggttagctaggatgaggggtttgctgggcttcagtgcaggcttctgcgggttcccaagccgcaccaggtggcctcacaggctggatgtcaccattgcacactgagctcctggcaggctgtaccaattttttaattatttaatatttatttttaaaattatggtgaatattttggtattctgctctaaaataggcccataaatgcacagcagatatctcttggaacccacagctttccactggaagaactaagtatttttcttttaaagatgctactaagtctctgaaaagtccagatcctctacctctttccatcccaaactaagacttggaatttatgagagatctagctaacagaaatcccagacacatcattggttcttcccagagtgcagtcctcctaaagaggctcagccctaagcaggcccctgcaccaggagggtgggtctgagacccacatagcacttcccaaggtgcatgctccagagaggcactgaaacagctgagcacaagcctgcaagcctggagaactctcacagtcagaacggagggggcccagtgggactaacataaagagaaaagggaacacagagaaatggatggcaccaacaaccagcaaagccttcatggccaatgaaagcatcagtgacggggccagaaccctcatccccaaagactcttcactgcctttagtgaaaaacaatggctagagagtgaagttatgatcatgtatagagaggtaaagttacatttttatattctgactctgctaatgtgaaattccctatctgctagactaaaagtttcagacaccctgttcaaatatcccattagttgctagagacttaaaatgaacagaacgcacattgtcaggatgactattaccaaaaaatcaaaagacagcaagtattggtgaggatgtagagaaactggaacttttgtgcactgtttatgagaatgtaaaatggagcagctgctgtggaaaagagtatgcaggttcctcaaagagtaaaaccaagatgtggaaacaactaaatgcccatcagtggatgaaggggtagacaatatgtggtatatacataccatggagtactattcagcctctaaaaaaaaaaaaggaaattctataacatgcaacagcatggatgaatcttgaggacattttgctaatgaaataaggcagtcatagaaagacaaatactgcacgactccacttatatgagataccaaaaatagacaaattcatagaatcaaagagtacaatggaggttacctggagctgcagggcgggaaacgaggagttactaatcaacgaacataacgttgcagttaagtaagatgaataagctctcaagatcagctgtacaacactgtacctagagtcaacaataatgtattgtacacttaaaaatttgttaagggtagattaacaaatgtagtagatccacaaatgtggttaagtgttcttaccacagtaaaataaaaaaagaatatcaagcccaggagttcgagactagcctgggtaacatggtgaaaccctgtctctacagaaaatacaaaaattagccagctgtggaggtgcactcctagggaggctgaggtgggaggcttgcttgagcccaggaggtcaaggctgcagtgagccatgattgcaccactgtactccagcccagatgacagagcaagacaccaccccccccaaaaaaagaaaaagaatatcaaacattttaaaagatcagatacgcaagaacaacaacaaaaaagagatgaacagagcatcgaccctcatctagtgggattcttggtctaactgaaaaacagacattgagagacaaacaatgacagtgatgtgatcacagcaattacacaggtatcccctggggactgcagaagaaaggaggaatgcctaactttcagaaaatagagaaagcgtcaaacagttggtgaaagccttccaaaactagagagaactgcacacaccaaatcacagaaagaagaaaagccgtgggagattctgggacccaccggctatttttgatggctgaacaccctgctgcaggagagacaggagctggaaagcatggtgggatgaaacctcaaacagctttgcctgcattgcttaagatgactgggcttgattaactctagtcaatggggacaattcaatcaaagaagaaagatgctcaaattcacattttagaatgattttttatggcagtatggggaatagattaaaagagagtgaagctggaggcaagaaacttgttaagaggcaactgaaacagtctagatgataaataataaactgacagagtgactagaaaaatcagaacaggctgaatcaacagatacctagatgaaaataacaggacttgatcaccagttgtatcttggagaggaaggagttgtttccttgctttccctacgactgggaatacggaaggtttgccgtgtgtattggttatatactggtgtgtagccaatcactgacaaccatttagcagcttaaaacacaaaggcttatctcccagtttctgtgggccaggaatctaagataggcttagctggctggttctggctcagagtttctcaagaggttgcaatcaagatgtcagctggggttgcatcatctgaaggctcaactggggccggagggtccacttccaaggagttcactcacctgcctgacaaggcagtgctggttgttggcaggagatctcaattcattgccaagtgagcctctctatagcattgctggaacatcctccccatctggcagttggcttctctcagcatgagtgatctgagagagagagcaaggaggaagccacagtgttcttcctactcctactcctaacactatggacctactcctaacactctcacttctgccttattccattagttagaaagggaactaagctccacctcttgaaataagaagtgtcaaagaatttgtggatatatttaaaaatcatcacactgtggaagtggatagggggttcaattaatgctgaacttgaaatgcctgagacattcaaatgtccaacaggcaatgaacatacccatagatggtcatgactttagcaagaatagaggaagatcacagaattaaggaggaattgaaaggtaaaagaagtggagtcagattccccctgaaaagtgagccatgaaaggaactttaactattgagttagaggtcagagtaggaaatttcggtggaattcttttttaaagaaaggaaccatataagcatgttttgaggtagagggagaataaatcagtagacagggagaggtaaaaaacataaatgataggggatagttgacaaaggtcttggcagaatcccttacccattgacttggggccaagagagggacacttctttgtttgagggataaggaaaataagaaagaatgggtgctatttagtgtggtcctgtctctagggcaaacgcataggtaacaaactgtgtgtgttaggaatatagatgtgacctcacattgagattctcacctcaaatccattttgttgttacctgtaccttcctaccttctctttttgctacatgcagactgctgttttgtcttcctggcctgttccaggtttcagcattctggcatatctgctaccctgttcccaaacctctctagagtccatgctccttccttggatagtgtttgattgggccacgtatctaagaagtgatgccttcagttaggcctgagaacctcctctatggaaatctccatcagtgaccctgacagacttggtatcttggagatgtcactgctcccagcctgtggtctaggagaatctcagcctgggcctctagtagtatggataaggcgttaaggtatctttgaaccagagtctgtcatattcctcaatgtgggacagataaaacagtggtagtgctggtgtttctgagctagaactctggtttttggtctagattctttgatgtatgacctttcagaggtattaaaatttgttctaatacaatgttcaatacaaatgtagttccttttctgttaggacctcaacaaaacatgaccaactgtagatgaacattaaactatgacaattcatggaaatgaatacagtaatacctgcggttcccccattttagcagtcactatggtgacatttggcacaaatggctatttaagggtgcttttgttaaaacctaccatcttactaggcacatgatattgaaactaatgaaataatggagaaacttcttaaaaacttttaatgaataaagtgatgaagtgataatattttagctgctatttataaagtgactattacaggtcaaacattcttctagggtttttttgttgaagttgtcacatttaatccttaataacccactatgagtcaggtattcttctctcccctttggacagttggggaaatgggggtcagagaggttaggtaatttgctcagggccacacaacctgcatgtagaaaatctgagatttgtacaggaacgtatcaaactctgaagtccatgcttctattttcccatgctgcctttctaataaaaggtaactaatgctactggatgctgcccccaaagtgagtcactttcaccccaccctacttgattttctccataaaactaatcacatcctgacaacttatttattgctgatctcccccactagattataaactcaataaaagcaagatccttgtctgctgaatatcagtacctaaaacgctgtctagcacagagcaagtaattaatatttgttgaatgaacaaataaaggaaaaaaattcaaaggaagaaaaagccctaaaacagatgtttacctaaacatacattttaaaagaaagcatataacaaattcaggacagaatttaaatttgattttttaaagaaataaccaagtgctagctgggcacagtggctcacacctgtaatcctagcactctgggaggccgaggcaggcagatcacttgaggtcaagagttcaagaccagcctggccaacatggtgaaacctgtctctactaaaaatacagaaattatccaggcatggtggcaggtccctgtaaccccagctactcaggaggctgagtcaggagaattgcttgaacccaggaggcagaggttgcagtgggccaagattgcaccactgcactccagcctgagtaacaaagcaagactctgtctgaaggagaaggaaagaaagaaggaaagaaggaaagaaggaaagaaggaaagaaggaaagaaagaaagaaagaaagaaagaaagaaagaaagaaagaaagaaagaaagaaagaaagaaagaaagaaaaagaaagaaagaaagaaagaaccaagtgcttatttgggacctactatgctatgtttttccatgcacgctattttcagtaaagcagttagcaaacttgcaagatcataacaacaaatatatgcttctataactctaaaattgtgctttaagaagttcctctttaccagctcatgtatgcattagttttctaagagttactagtaactttttccctggagaatatccacagccagtttatttaaccaaaggaggatgcttactaacatgaagttatcaaatgtgagcctaagttgggccagttcatgttaatatactccagaacaaaaaccatcctactgtcctctgacaattttacctgaaaattcattttccacattaccaaggagccagggtaggagaatatagaaagaccacccaagaatccttacttctttcagcaaaatcaattcaaagtaggtaactaaacacatgccctaacaatgaatagcagattgtgctcagaagaatgatctacaacatcttactgtgaaggaactactgaaatattccaataagacttctctccaaaatgattttattgaatttgcattttaaaaaatattttaagcctaaattttaaaaggtttgatattggtacatgaatagacaaacagacatggactagaccaagaattaggttcaaacatatacaggaatttaatatacgataaatctagtattccaaaggaaccaacaaatggtgttcagacagcaggataggcatcaggaaaaacacagttgggcaccctaccttactcctaacaccaggagtaactgaaggagcaccaaatatttatttattttaattatagttttaagttctagggtacgtgtgcacaacatgcaggtttattacataggtatacatgtgccatgttggtgaggagcaccaaatatttaaaagaaaaaaattggccaggggcggtggctcacacctgtaatcccagcactttgggaggccaaggtgggcagatcacctgaggtcgggagttcgagaccagcctgagcaacatggagaaaccccatctctactaaaaatacaaaattagccaggcatggtggcacatgcctgtaatcccagctacttgggaggctgaggcaggagaatagctttaatctgggaggcacaggttgcggtgagctgagatattgcactccagcctgggcaacaagagcaaaacttcaactcaaaaaaattaataaataaataaaaataaagaaagaaaagaaaaaaatgaaaatagtataattagcagaagaaaacaccgtagaatcctcggactcttaggatggggaatgcctataatataaaaaccctgaagttataaaagagaaaatcacctacatacaaaccaaatctttctacatgcctaaaacatagcacaaacacagctaaataatcatagctgaatgaactgggaaaacaaaacttgactcatatccagacagagttaattttcctacacataaagagtacctatataaacccaacaaaaaaaccaccactaacccaaaataaaaatgtgacaggtaatgaacaggtagttcacagagaatacaaatggctcttcggcacataagatgctcagactgacttttacttatttattttttgagagacagggtctcacgatgttgcccaggttaggctcaaactcctgggctcaaatgatagtaccaggactacaggtgtgccccaccgcacctggctcctcaaccacctgtattaacaggaaatgcaaaataaaactttcaaatctattttacctattagaatggcaaaaatttgaaaaacttcaaacatcatcatgttggtgagaatgtgaggagactggcactctcattttttgctgatagcatatatatactgatggcttctatggaaagcaatctggcagcgtctatcaaatgtacaagtgcatatatcctttgacaaagcaattccactctaggaatgtgttctatatggttgtgcttcctggggctgggaactgggagctaagggacaggggcagaagataatcttcttttccctccttccccgttaaacatgttgaattttatatactgtaatatattatttttcacaaaagataatttttaagcgatatgtctgggaatttttttttttcttttctgagacagggtctcactctgtcatccaggctggaatgccatggtatgatctcagctgactgcagcctcgacctcctgggttcaagcaatcctcccacctcagcctcctgagtagctgggactacaggcacgtgccatcatgctaatttttgtatatacagggtctcactatgttgcccaggctaatgtcaaactcctaggctcaagcaatccacccacctcaggctccaaagtgctgggattacaggcgtgagccaccgcgcctggccctgggaattcttacaaaagaaaaaatatctactctccccttctattaaagtcaaaacagagaaggaaattcaacctataatgaaagtagagaagggcctcaaccctgagcaacaaacacaaaggctatttctgagacaggaatttgctgaacaaaatcgagggaagatgacaagaatcaagactcacttctcggctgggcgcagtggctcacacctgtaatcccagcactttgggaggccgaggcggacagatcacgaggtcaggagattgagaccatactggctaacacagtgaaacccagtctctactaaaaatacaaaaaattagccgggcgtggtggcaggtgcctgtagtcccagctacttgggaagctgaggcaggagaatggcgtgaacccaggaagcggagcttgcagtgagccgagatcacgccactgcactccagcctgggtgacagagcaagactctgtctcaaaaaaaaaaaaaaagactcatttctctagatcttgagccgtattcaaatttatctcagcttagtgagaggttaaagcaaggaatatccttccctgtgggccctgctccttactgaaggaaggtaacggatgagtcaaggacaccaatggagaaaagcactaacaccattatctgatgaacattacgtgaagaagggtaagaagtgaagtggaattgctgaagaagtcagtgaaagcggacattcatttggggaaatggaatataggaaatccataaaagtgattaaaaagatgttagaggctgaggcggggggaccacagggtcaggagatcgagaccatcctggctaacacggtgaaaccccatctctactaaaaatacaaaaaattagccaggcgtggtggcaggcacctgtagtcccaactactcgggagactgaggcaggagaatggcatgaacctgggagacggagcttgcagtgagccgagatcacgccactgcactccagcctgggtgacagagtgagactccatctcaaaaaaaaaagttagatacgagagataaagatccaacagacacacaactgctaattctgaacagaacaaaacaaatggcacaggaaaagaaaatttaagatataacaccggaaaactttcctgaaattgagtaactgaatctatagcttgaaagggtttagcatatgccaagaaaaatcagtagagtccaaccagcacaagacacatctagcaaggctggtgattctaccaacacagagaaagaagtgggtgacccataatgcggaaaaaggcagaccatctgcagtcttctccagaacactggagtctgaagacaaaagaatgctgcctactgagccagaagggagagaaagtgacccaacacatctttaccaagttagaatgtcacgcattatttaaaggctgcaaaagccatgaaagacatgaaagaacacaagcatttacaacatgaaagaacacaagcattctcatactcaagaatccttaagaaaaatgtagtcctaatccagcccactgaaagttaaatgtacttaatgtgctcattaatgggaacttcatagcttcaaatcagtctggtcccatctaccaacatctctcgcccggctttcctgcaatagtcagcacctttccctcctcccagtcttgtcccctggagtctgctctcagcatagcagagtgaccacatcaacacccaagtcagagccctccagtgcgcactggtctacaaagcccttcccaccccccaccccacgtgccctccggatccttgtgacgtgtctcctgcataccctagcagccctggcctcctcactgcccctcctgtacatcaggaaggcgactccttgagtcttggctctggccgcctcctccacctgcagtgagttaactcccttacctactctaggtcattgctcaaatgtcagcatctcaatggggccctccctgactaccctatttaaattctacatactccccttgaccccatggacctcactcaccctattccacttttattcttacaatttagcacttgttctcttctaacgtattctaagacttactcatttattacattgtttgccaccccctctagtacataaactccagaggggcagggatttctgtctatttattcatttctttatccctaggacatagaacagggcatagttcagagtattcaatgttatcaatgaatgaactagcagtagtaccagttccagttaggcacagaattaaatctaaatagaattaaatctcatggtctgggttaactatggatagaaaattagatataattttaagaagcctagaaagaaaaaattaataatgtaaaaataatattaatttgataataataacaaaaactctgccaggcactgtggctcaaatctgcaatcccagctactcaggaggctgaggtggaaggatcacttgagaccagagttcaagactcagcctaggcaacacggcaagaaactgtctctaaaaaaattaaaacttaaatttttaaaaaagaattctcaaagcgtcacaaaaactggagattaaggtacaggaagtgtgaagtaatattactatgctaatggttttttttttttttagaaaggtataaccaaaagatttctttctcaagtcgataaactgagaaagataagcatatcttccaattaacagagggggaggaaaagccagatacaacaaaataagatataaattagtttccagttgaaaacaagagtaggagttattttgcatcacctcacctgtgacctcccccagcccaaaaaacactactgataaacagggtagaaaagcatcatctcagataaagcaggaaaaactgccacagtctcaaaccacaaactataagcacacacctggccaaccctgccaagtctgggctcagtaggaggaacgtgctgagagctaggatgtaccaacttagacattctgtgggatacagatgtccctggaagggtcacaccatctcaaaggcacctgtaatgcccactgattacagccaccatatgtgagagagaaactcagggcacttagagagtataacaagaaccttatgtcatctgagatgaggaatcctcagccctgcaaattaaccaactctttagaacaactggcaaaacataaatatccacaacttttgtttcagtaattccactcttagatatcaatccaaagtacatgagacagcagatacacacacaaaatggtatttactgcagcattgtttataatagcaaaaaacaagaaataatccatatgtctcaataggatactgggtacatgagggtatgtacccatcattcaaccatcaaaaagagtgatatggatgtccacagatggacataaaaagctgtgtgttacgtgaaaacaaactcaagcagcagcaggatgggcttatgatagtcagtatgagctaatttctggaaaaaaaaatctagtgtgtgcacagaaaacatctgaaagaacagaaacaaaactatcagcagaatattgagatgttttactaagttgtatatctatactgcttgtaatttttaccccaagcaagaattactttttggaaaaagaaaattcaggaaataaagcatttctttaaacttcatgtttaaacaaatggtgatggaataaaagagttcttattcatcataaacacacacagcacacatgcacgcatgtgcgtgagcacaccctttacttgataaataccatgttgaatattttagtctttccttttaggttctatcccttcactcaaaatgcggttataaataaatgtacttttcatgtgccttctgcctaaacccactttaatataactttacagtcccattatcattatagtctcaaagctagactcagcctgaaactaccctttcatttggaacccttattaaaatgccacatacagctccttcaaataaaaacaaaccctaggacctgacactaggcttcctttgttgctactcataatggccaagttctgtgcttataatacatcttctttcattttattgctacatatccaagggttttatatgtttttcttattatatcttaattcaaaacaccatcacgctcttttccagatgaaaataaggaaaagaaattgagcaactgactgacttaaaggtcataaaactatatagtagcagagtcagcaaaagaagaaacacacatctcccaagtagaggctgaaaaccagtaccattcacctccagggtgagctatatacagattacaaagtcaccttctctaaatgttcaaactgaatcccatacccatactttaccactacctcgtaagaacagcctcagatcttgttatagccttttttttagcatgctgaagccaataaaatgcttcccattcagcaagagaaacaagttctgaaacactgaataatctgcccagggcctatgaacatttccactgtgagaaatgttctccactgtgtggagaagatccttactcttctccacacaggcagaacattagaaaaattcttggattctatgatgcacagcttaggagtctgtttagcacaatttaagtccaaatagttattaaatcctcctctgttccagaaacagtgctaaatactgtgaatataaaaattgaaaagatactctcctggctcccaagaaagtcagccagatagaggagacacaggcacacaaatcactgtcacatgaagctctacctccctaacttcaaacgagggcctaagtcaccaagaatacagtagcagttgtgactacgagtaactactataattcaatactttatcttcccttagaaaactcttctcccttggaaatttatttgcatttctaaataccattccttactaaaaggaagcagggctccttggggaaatagctgattctaggtgtggactatgaaatgaaaatggtgagtctgggacatcccatgttgcccagaaatcaaggaactgcccaaagattaacagagtcatgttaaatggacctaagagtgaaccagaaggagctcactttgccccgcgtggaacaatttcaagaaaaacatgacagtaatgaattataaaacatgaattaaaatacatattggtactaaaaagagaacaaaaggatgtggctttggataaagctcttcttcatggaagaataccagctaataaatgtaaaggaaatgagagaattagaaaaattatcattttgtaaaccttaatatattcacctagacatgctaaaaccactgagtaaaaggctgcttgggaagaggatgctcacatgatctcagagtttcacaccacagataatttattagatacaggaaggaagatgtgatcaagcttcctgtgacccccagccaggccccacaacactatgtgcctccttgtgatgtgggagctacacagcatcgcccacacagcttctcgccaaaactgtttgaagctaatcacaagggaagaactggacagcttctgaccatgagacgctccaccagacaacttgcttggcctctccaaagaaacttgcttggcctctccaaagaaaactcagtttcatttaaaaacaaaactaattatttaaaaacaaacgaaaagcaagttgtggacttgagctccagggacagagcagacatacttttccctgttcttcccagtaagtggtaataaaaaccctcaacactagatataaaacaaatataagaaggttctggaaggggaagaggaggcagactatccaggtgccttgaggcccacagaacaacccagtgatgggttcactgggtcttctttttgcttcattatctcagacttggagctgaagcagcaggcaacttcaaaacaccaaggggcacagattgaaaagccccaagaaaagcctgccctctctagccaaaggaccaggaaggagacagtctaatgagatggaacacatttagacagtaactgcccatttaccagcaataactgagcagggagcctagacttccagtcttgtgaggacgtaccaaggtacccaacacccccaccaaggctgagtaaggactgcgacttttatccctgcatggcagtagtaaggagcccatccctcacccgccagcagtgtcaggggaacctggacttccactcccacccaggagtgatgaggccctccctgctggggtcatgtcagaggaggcctagtggagattcagtgacttaaccttttcccagagataatgaggccacctttcctccctcttcccccatggtgacagtgaaagcactgtggcaagcagtaggcactcctacccctcctagccagggaggtatcagggaggccaagtagggaaccagaatacccacaaccacccagcagcaacaggggtcccccaccccattgggtgtcaatggaagcagagcggaaagcctggatatttacccccatctagaagtaacaagctgatgtcccccttcttctactacaatggtgttcaaaacaggtttaaataaggtctagagtctgataacgtaatacccaaatcgttgaagttttcattgaggatcatttataccaagagtcaggaagatcccaaactgaaagagagaaaagacaattgacagacactagcactaagagagcacagatattagaactacctgaaaggatgttaaagcacatatcataagcctcaacaggctgggcgcggtggctcacgcctgtaaccccagcactttgggaggccgaggcaggtggatcacaagatcaggagatcgagaccatcctggctaacacggtgaaaccccgtctctactaaaaatacaaaaaaaaatagcaaggcatggtggtgggcacctgtagtcccagctactcgggagcctgaggcaggagaatggcatgaacctgggaagaggagcagtgagccgagatcgcaccaccgcactccagcctgggcaacagagcaagacttcgtcccaaaaaaaaaaaaaaaaaaaaaaaaagcctcaacaaacaactacaaacgtgcttgaaacaaatgaaaaaaaaatcttggcaaagaaataaaagatatatattttggccaggtgcagtggctcacagcctgtaatccctgcactttgggaggctgaggcaggcggatcacctgaggtcaggagtttgagaccagcctgaccaacatggagaaaccccgtctctactaaaaatacaaaattagccagtcatggtggcacatgcctgtaatcctagctactcaggaggccgaggcaggagaatcgcttgaactcaggaggtggaggttgcggtgagccgagatcccgccattgcacattgcactccagcctgggcaacaagagcaaaactccatctcaaaaaaatagatacatattttaatggaaattttagaattgaaaaatacagtaaccaaattgaatggaaagacaacatagaatggagggggcagacaaaataatcagtgaacttcaacagaaaataatagaaattacccaatatgaagaacagaaagaaaatagactggccaaaaaataaagaagaaaaaagaggagcagcaggaggaatgatggaaaaagagaaaggaaggaaggaagggaaggagggagggaaggagtgagggagaaagtctcaaagacctctgagactaaaataaaagatctaacacttgtcatcagggtccaggaaagagacaaagatggcacagctggaaacgtattcaaaaaataatagctgaaaacttcccaaatttggcaagagacataaacctatagattcgaaatgctgaaccccaaataaaaagcccaataaaatccacaccaaaatacatcatagtcaaacttctgaaaagacgaaaagagaaaacgtcttgaaagcagtgagtgaaacaacacttcatgtataagggaaaaacaattcaagtaacagatttcttacagaaattaaggaagccagaaggaaatgacacaatggttttcaagtgctgaaagaaaagaagtgtcaacacaaaattctagattcagtaaaaatatccttcaagaatcaatgggaaatcaagacagtctcagataaagcaaaataagagaatatgttgccagcagatctcccctaaaggaatggcaaaaggaagatcatgcaacagaccaaaaaatgatgaaagaaggaatccagaaacatcaagaagaaagaaataacatagtaagcaaaaatacatgtaattacaataaaatttctatctcctcttaagacttctaaattatattgatggttgaagcaaaaattataaccctgtctgaagtgcttctactaaatgtatgcagagaattataaatggggaaagtataggtttctatacctcattgaagtggtaaaatgacaacactgtgaaaagttacatacacacacacacgtaagtatatataaatatatgtgtgtatatgtgtgtgtatatatatatatacatataatgtaatacagcaaccactaacaacactatacaaagagataataaccaaaaacaatttagataaattgaaatggaattctaaaaaatattcaaatactctacaggaagacaagacaaaaagagaaaaaaagaggaggacaaactaaattttttaaaaacataaataaaatggtagacttaagccctaacttatcaataattacataaatgtaaatgatctaattatatcaattaaaagacagagatagcagagttaatttaaaaacatagctataagaaacctgctttgggctgagtgcagtgactcacacttgtaatcccagcacttcgggaggccaaggcgggtggatcacctgaggtcaggagttccagaccagcctggacaacatggtaataccccatctctactaaaaatacaaaaaaattagccaggcatggtggcacacgcctgtagtcccaactactcaggaggctgcgacacaagaactgcttgaacccgggcagcagaggtagcagtgggccaagattgcgccactccagcctgaacgacagagtgagactccacctcagttgaaaaacaaaaaagaaacctgctttaaatataccaacatatgttggttgaaattaaaagaataaaatatatcatgaaaacattaatcaaaagaaaggagtggctatattaataacataaaatagacttcagagaaaagaaaatttcaagagacaggaataaaaggatcaagaaaagatcctgaaagaaaagcaggcaaatcaatcattctgcttggagattcaacaccctctcttaacaactgatagaacaactagacaaaaaaatcagcatggagttgagaagaacttaacaccactgaacaacaggatctaatagacatttacggaacactctacccaacaatagcaaaataaacattcttttcaagtattcactgaacatatccttagaccctaccctgggccataaaacaaagctcactagtgattgccgaaggcttggatggacagtggaagagctgcatggggagggagaaggtgacagttaaagagtgtaggatttctttttgggataatgaaaatgttccaaaattgattgtggtgatgttggcgcaactctacaaatataaaaaaggccattgaattgtacgttttaagtgggtgaaacatatggtatgtggattatatctaacgctttttaaaaacttaacacatttcaaagaatagaagtcatacagagtgtgctctactggaatcaaactagaaagaggtaactggaggataacgagaaaagcctccaaatacttgaaaactggacagcacatttctaaaatcatccgtgggtcaaagatattcatttctgatattcatttttattgtttaatgtatttttaaaaatttcttaagggaaataaactgactaaaaatgaatatggctgggtgcggtggctcacgcctgtgatcccagcactttgggaggccgaggctggtggatcacaagatcaggagttcgagaccagcctggccaagatggtgaaaccccgtctcaactaaaaaactacaaaaagtagccaagcgcagtggcgggagcctgtggtcccagctacttgggaggctgaggtaggagaatcgcttgaacacaggcagcagaggttgcagtgagccaagattgtgccactgcacgccagcctgggcgacagagactgcctcaaaaaaaaaaaaaaaaaaaagaatatcaaaatttgtgggacatagttaaagcaatgctgagagggaaatttataacactaaatgtttacattagaaaagagaaaaagtttcaaatcaatagtctccactcccatctcaagaacacagaagatgaagagcaaaataaacccaaagcaagcaaaagaaagaaaatataaaaataaatcagtaaaattgaaaacagaaacacaataaagaaaatcagtgaaacaaagtactgattcttcgaaagattaataaaattgacaaacctctagcaaggctaacaaacaaaaaagaaagaagacacggattaccagttattagaatgaaagcataattagaaacaactctacacattataaatttgacaatgtagatgaaatggactaattactgaaaaaacacaaattaccacaactcacccaatatgaaatagataattgggatagcctgataactactgagaaaattgaatttgtaattttaacactcttaaaacagaaacattaaacttaatattttataaatattagataaggtaattatacccttccttaacaaataaaaacgacaaattattttgcagctaaagagatgtatgtactgtgaaaaatatcttcagaaaaatagaactttgtttgaagaataaggatttaaaaaatgtttttaactctcaagaagcaaatatctgggcccagatggtttcactgaagaattctaccaaatgtttaatgaagaattaccaccaactctacatagcatctttgagaaaactgaagagaagggaacatctcccagttcattttatgaagtgggtgttactctgatactagaactgtataaggacagctactcttgacacactgcctatgggtagctctgctctgcaggaacagtcagaaaaaaaaaaaaaagaagcactggacaagggcagtataaaaaaagaaaactgggccaggtgcagtggctcacacctgtaatctcagcactttgggaggctgacgctggtggatcacctgaggtcaggagtttgagactagcctggccaacatggtaaaaccctgtctctactaaaatacaaaaattagccaggcagggtggtggggaaaataaaaaggaaaaaaaaacaaaaataaactgcagaccaatatccttcatgagtatagacacaaaactccttaaactccttaacaaaatattagcaagtagaagcaatatataaaaataattatacaccatgatcaagtgggacttattccagaaacgcaagtctggttcaacatttgaaaacaaggtaacccactatatgaacgtactaaagaggaaaactacataatcacatcaatcaatgcagaaaaaagcatttgccaaaatccaatatccattcatgatactctaataagaaaaataagaataaaggggaaattccttgacttgataaagcttacaaaagactacaaaagcttacagctaacctatacttaatggtgaaaaactaaatgctttcccctacgatcaggaacaaagcaaggatgttcactctcattgctcttatttaacatagccctgaagttctaacttgtgcaaaacgataagaaagggaaatgaaagacctgcagattggcaaagaagaaataaaactgttcctgtttgcagatgacatgattgtctcatagaaaatgtaaagcaactaggggtaggggggcagtggagacacgctggtcaaaggataccaaatttcagttaggaggagtaagttcaagatacctattgcacaacatggtaactatacttaatatattgtattcttgaaaatactaaaagagtgggtgttaagcgttctcaccacaaaaatgataactatgtgaagtaatgcatacgttaattagcacaacgtatattactccaaaacatcatgttgtacatgataaatacacacaattttatctgtcagtttaaaaacacatgattttggccaggcacagtggctcatacctgtaatcccagcattttaggaggctgaggcgagcagaaaacttgaggtcgggagtttgagaccagaatggtcaacatagtgaaatcccgtctccactaataatacaaaaattagcaggatgtggtggcgtgcacctgtagacccagctacttgggaggctgaggcacgagaattgcttgaacaagggaggcagaggttgcagtgagctgggtgccactgcattccagcctggtgacagagtgagactccatctcaaaaaaaataaaataaagcatgacttttcttaaatgcaaagcagccaagcgcagtggctcatgcctgtaatcccaccactttgggaggccgaggcaggcagatcacaaggtcaggagtttgagaccagcctgaccaacatggtgaaaccccatctctactaaaaaatatataaattagccaggcatgtgtagtctcagctactcaggaggctgaggcaggagaatcacttgaacccggaggcagaggttgcagtgttgagccaccgcactccagcctgggtgagagaacgagactccgtctcaaaaaaaaaaagcaaaataacctaattttaaaaacactaaaactactaagtgaattcagtaagtctttaggattcaggatatatgatgaacatacaaaaatcaattgagctggacaaaggaggattgttttaggtcagtagtttgaggctgtaatgcacaatgattgtgcctgtgaatagctgctgtgctccagcctgagcagcataatgagaccacatctctatttaaaaaaaaaaaaattgtatctctatgtactagcaataagcacatgggtactaaaattaaaaacataataaatactgtttttaattgcctgaaaaaaatgaaatacttacatataaatctaacaaaatgtgcaggacttgtgtgctgaaaactacaaaacgctgataaaagaaatcaaagaagacttaaatagcgtgaaatataccatgcttataggttggaaaacttaatatagtaaagatgccaattttatccaaattattacacaggataacattattactaccaaaatcccagaaaaattttacatagatatagacaagatcatacaaaaatgtatacggaaatatgcaaaggaactagagtagctaaaacaaatttgaaaaagaaaaataaagtgggaagaatcagtctatccagtttcaagacttacatagctacagtaatcaagactgtgatattgacagagggacagctatagatcaatgcaaccaaatagagaactaagaaagaagcacacacaaatatgcccaaatgatttctgacaaaggtgttaaaacacttcaacgggggaagatatgtctctcattaaagggtgtagagtcattgcacatctataggcaaaaagatgaacctgaacctcacaccctacagaaaaattaactcaaaatgactcaaggactaaacataagatatacatctataaaacatttagaaaaaggccacgcacggtggctcacgctcgtaatcccagcactttgggaggccaaggcaggtggatcacctaaggtcaggagtttgagaccagccggatcaacatggagaagccccatctctactaaaaatacaaaattagctggacgtggtggcacatgcctgtaatcccagctacttgggaggctgaggcatgagaatcgcttgaacccggggggcagaggttgcggtgagccaagatcacaccattgcactccagcctgggcaacaagagcaaaactccaactcaaaaaaaaaaaaaaaaaggaaaaatagaaaatctttgggatgtaaggcgaggtaaagaattcttacacttgatgccaaactaagatctataaggccagtcgtggtggctcatgcctgtaattccagcactttggtcaactagatgaaaggtatatgggaattcactgtattattctttcaacttttctgtaggtttgacatttttttagtaaaaaattgggggaaagacctgacgcagtggctcacacctgtaatcccagcactttgggaggccggggcaggtggatcacacggtcaggagttcgagaccagcctggccaacatggtgaaaccccgtctctaccaaaaatataaaaaattagccgggtgtcatggtgcatgcctgtaatcccagctactgaggaggctgaggcaggagaatcacttgaacctgggaggtggaagttgcagtgagccgagattgtgccactgcactccagccttgggtgacagagcgagactccgtctcaaaagaaaaaaaaaaaaaagaatatcaaacgcttactttagaaactatttaaaggagccagaatttaattgtattagtatttagagcaatttttatgctccatggcattgttaaatagagcaaccagctaacaattagtggagttcaacagctgttaaatttgctaactgtttaggaagagagccctatcaatatcactgtcatttgaggctgacaataagcacacccaaagctgtacctccttgaggagcaacataaggggtttaaccctgttagggtgttaatggtttggatatggtttgtttggccccaccgagtctcatgttgaaatttgttccccagtactggaggtggggccttattggaaggtgtctgagtcatgggggtggcatatccctcctgaatggtttggtgccattcttgcaggaatgagtgagttcttactcttagttcccacaacaactggttattaaaaacagcctggcactttcccccatctctcgcttcctctctcaccatgtgatctcactggttccccttccctttatgcaatgagtggaagcagcctgaagccctcgccagaagcagatagtgatgccatgcttcttgtacagcctacaaaaccatgagcccaataaaccttttttctttataaattatccagcctcaggtattcctttatagcaagacaaatgaaccaagacagggggaaatcaacttcattaaaataatctatgcagtcactaaacaaataagaacaagaggctccagaagtgggaagccaatacccagagttcctacaatacagtatctgaaaagtccagtttccaaccaaaaaatatatatatacaggccggacatggtagcttatgtctgtaatcccagcactttgggatgctgaggcgggcagatcaccctaggtcaggagttcgagaccagcctggccaatatggcaaaaccccgtctctactaaaaatacaaaaattagccaggcatggtggtggatgcctgtaatcccagctactcgggaggctgaggcagggaatcacttgaacccaggaggcagaggttgcagtgagccgagatcacgccactgaactccagcctgggcaacaaagtgagactccacctcaaaaaaaaaaaaaatatacatatatatatgtgtgtgtgtgtgtgtgcgcgcgtgtgtgtatatacacatacacatatatacatatatacagacacacatatatatatgaagcatgaaaagaaacaaggaagtatgaaccatactttctgtggttatgataggatggggtatcacgggggaagtagacaagggaaactgcaagtgagagcaaacagttatcagatttaacagaaaaagactttggagtaaccattataaatatgtccacagaattaaagaaaagcgtgattaaaaaaggaaaggaaagtatcataacaatattactccaaatagagaatatcaataaaggcatagaaattataaaatataatacaatggaaattccggagttgaaaggtagaataactaaaatttaaaattcactagagaaggttcaacactatatttgaactggcagaagaaaaatttagtgagacaaatatacttcaatagacattattcaaatgaaaaataaaaagaaaaaagaatgaagaaaaataaacagaatctcagcaaaatgtggcacaccattaatcacattaacatatgcatactgagagtaccggaagcagatgagaaagaggaagaaaaaatattcaaatgatggccagtaacttcctagatttttgttttaaagcaataacctatacaatcaagaaactcaatgaattccaagtaggataaatacaaaaagaaccacaaacagatacaccatggtaaaaatgctgtaagtcaaaaacagagaaaatattgaaagcagctagaggaaaacttataagagaacctcacttacaaaagaacatcacttataaaagaaccacaataatagaaacagttgacctctcatcagaaacaatgaatgataacatatttgaagtgctcaaagaaaaaaaataaagattcctatatacgacaaagctgtctttcaaaaatatacatccaaaaggattgaaaccagggtcttgaagagttatttgtacatccatgttcatagcagcattattcacaatagccaaaaggtagaagcaacccaagggtccatcgacaaataaataaaatgtggtatatgtatacacaatggaatttattcagtattaaaaaggaatgaaattctgacacatgctacaacatggctaaaccttgagaacactatgctaagtgaaataagccagccacaaaaggacaaataccatattacttcacttgtatgaaatacctagggtagtcaaattcagagatagaaagtaaaacagtggttgccaagggctgagggagggagtaacgtggagttattgttgaatgggtacagaatttcagttttgcaagataaaaagagttctggagacagatggtggtgagggtggtacaacaatacaaatatactttatactactgaacagtatacttaaaaatgattaacatggtgaaaccccgtctctactaaaaatacaaaaaaattagctgggtgtggtggcgggcacctgtaatcccagctacttgggaggctgaggcagcagaattgcttgaaaccagaaggcggaggttgcagtgagctgagattgcgccaccgcactctagcctgggcaataagagcaaaactccgtctcaaaaaataaaaaataaaaaaaatttaaaaatgattaagcaggaggccaggcacggtggctcacacctataatgccagcactttgggaggccgaggcaggcgatcacttgagaccaggagtttgagaccagcctggccaacatggcaaaaccctgtctctgctaaaaatacaaaaattagccaggcatggtggcatatacttataatcccagctactggtgagactgagacacgagaattgcttgaacccaggaggcagagattgcagtgagtcgagatcgcgccactgaattccagcctgggcgacagagcaagattctgtctcgaaaaaacaaaaacaaaaacaaaaagcaaaaccaaaaaataattaagcaggaaacgagattgctgctgaggaggagaaagatgtgcaggaccaaggctcatgagagcacaaaacttttcaaaaaatgtttaatgattaaaatggtaaattttatatgtatcttaccacaaaaaaaagggctggggggcaggaaatgaaggtgaaataaagacatcccagagaaacaaaagtagagaatttgttgccttagaagaaacaccacaggaagttcttcaggctgaaaacaagtgaccccagagggtaatctgaattctcacagaaaattgaagcatagcagtaaaggttattctgtaactatgacactaacaatgcatattttttcctttcttctctgaaatgatttaaaaagcaattgcataaaatattatatataaagcctattgttgaacctataacatatatagaaatatacttgtaatatatttgcaaataactgcacaaaagagagttggaacaaagctgttactaggctaaagaaattactacagatagtaaagtaatataacagggaacttaaaaataaaattttaaaaaatttaaaaataataattacaacaataatatggttgggtttgtaatattaatagacataatacaaaaataccacaaaaagggaagaagacaatagaactacataggaataacattttggtatctaactagaattaaattataaatatgaagtatattctggtaagttaagacacacatgttaaaccctagatactaaaaagtaactcacataaatacagtaaaaaaataaataaaataattaaaatgtttgtattagtttcctcagggtacagtaacaaactaccacaaattgagtggcttaacacaacttaaatgtattttctcccagttctggaggctaaacacctgcaatcaaggtgagtacagggccatgctccctgtgaaggctctaggaaagaatcctcccttgtctcttccagcttccagtggttctcagtaaccctaagtgctccttggcttgtagctatatcattcctagcaaccagaaagaagaaaataataaagattatggcaaaaaataatgaaatcaaaaggagaaaaatggaaaaaaataaataaaaccaaaagctagttctttgaaaagatcaaccaagttaacaaaccttttaactagactgacaaaaaggaggtaagactcaaattactagaatcagaaataaaagaggggacattactaatgagggattagaaaagaatactacgaacaaatgtgtgccaacaaattagaaaacttagatgaaatggacaggttcctaggacaacatcaactaccaaaatttactcaagaagaaagagacaatttgaatgagctataacaagggaagagactgaattgacaaccaagaaactatccacaaagaaaatcccaggcccagaagatttcactgtgaaattctttcaaacttataaatataaattaacatcagttcttcacaaactcctccaaaaaaaagaacagatctctatttacaggcgatacgatctttagaaaatcctaagggaactactaagacactatgataactgataaacaagttcagcaaggctgcaggatagaaaaccaatatacaaaaatctattatatttctatacacttgcagtgaacaacccaaaaatgagattaagaaaataattcaatttacaataacatcaaaaagaataaaaacactcaaaaataaatttattcaagtaagtgcaaaacttatactctagaagctacaaaacactgttaaaagaaattaaaggtttacataaatgaaaaactatcccatgttcatggatcaaaagacttattactggcaatgctctccaaattgatctataaattcaacaaaatccttatcaaaatcccagatgaggctgggggtggcggttcatgcctgtaatcccagcactttgggaggctgaggcacgcagattacctgaggtcgggagctcgagatcagcctgaccaacatggagaaaccctatctcttctaaaaatacaaaattagtcaggcgtggtggcacatgcctataatcccagctactcgggaagctgaggcaggagaatcgcttgaacccaggaggcagaggttgcagtgagccaagatcgtgccattgcactccagcctgggcaacaagagcaaaattccatctcaaaaaaaaaaaaaaaaaaatcccagatgacttcactgttgaaattgaaaagattattctaaaattcacatggaattgcaagaccttgagaatagccaaaacaaacttgaaaaacacgaacaaaatataggatgactcacttgccaattgcaaatgttacgacacagcaacagtaatcaagactgtgtggtactggcaaaagacacatacatacatacatatcaatggaatataattgagagtacagaaacaagcctaaacatctatggtaagtgcttttctatttttttctttttttttttcttttttgtagagatagaatctcaccatgttgcccaggctggtcttcaacttctgggctcaagcaatcctcccactgtggcctcccaaagtgctgggataactggcatgagccaccacatccagcccagatgattttcaaaaaagtcaacaagaccattcttttcaacaaataggtctgggatgatcagatagtcacatgaaaaaaaaaatgaagttggaccctccatcacactaaagtgctgcgattataggcatcagccaccacatccagcccaaatgattttcaaaaaggtcaacaagaccattcttttcaacaaataggtctgggataatcagatagtcacatgaaaaaaaaaatgaagttggaccctccatcacaccatatgcaaaaattaattcaaaaatgaattgatgacttaaacgtaagagttacgactgtaaaactcttagaaggaaacatacgggtaaatcttaaagacgttaggtttgacaaagaattcttagacatgacaccaaaagcatgaccaactaaggtaaaatagggtaaattgtacctaccaaaatgaaaaacctttgtgctggaaaggacaccatcaagaaatggaaagccaaaatagccaaggcaatattaagcaaaaagaacaaagctggaggcatcatactacctgacttcaaagcaacagtaaccaaaacagcatggtactagtagaaaaacagacacatagaccaatggaacagaataaagaacccaaaaataaatccacatatttatagtcaactgatttttgacaatgacaccccttcaataaatgatactaggaaaactggatatcgatatgcagaagaataaaactagacccctatctctcaccatatagaaaaatcaactcagactgaattaaagacttgaatgtaagacccaaaactataaaactactggtagaaaacataaggaaaaacgcttcaggacattggtccaggcaaagatcttatggctaaaacctcaaaaacacaggcaacaaaaacaaaaatggaaaaatagcactttattaaactaaaaagctcctgcacagcaaaggaaacaacagaatgaaaagacaacctgtagaatgggagaaaatatttgcaaactatccatccatcaagggactagtatccagaacacacaagtgactaaaacaactcaacagcaaaaaagcaaataatctggtttttatatgggcaaaagatctgaataaacattctcaaaggaagacatacaaatgtcactatcattctgccagtaccacactgtcttgattacttgttagtgtataaatttttaaattgggaagtgtgagtcatcctacactttgttcttgtttttcaagtttgttttggctattctgggagccttgcaagtataaaatagccaacaagtatgaaaaaatgctcaccatcactaatcatcagagaaataaaaatcaagaccactatgagatatcctctcactccagttagaatggctactatcaaaaagacaaaatataatggatgctggcaaagatttggagaaaggggaactcctatacactgtgggtagggatgcaaattggtaatggccattatggaaaataatactgaggtttttcaaaaaactgaaaatagaactaccatatgatccagcaaccctactactgggtatttatccaaaggaaagaagtcagtatactgaagaaatatatgcactctcatgttaattgcaacactgttcacaacagccaagacagggaataaatctaaatgtgcatcaacagatgaatggataaagaaaatgtggcatatacactcaatagaatactattcagccattaaagaagaatgaaatcctgtcatcccagcaacatggatgaacctggaggacattatatttaatgaaataagtaaagcacaaaaagataaacagtacatgttctcactcagacatgggtgctaaaaagaaaatggggtcacagaattagaaggggaggcttgggaaaagttaatggataaaaatttacagctatgtaagaagaataagttttagtgttctatagaactgtagggcgagtatagttaccaataacttattgtacatgttcaaaaagctagaagagattttggatgttcccagcacaaaggaatgataaatgtttgtgatgatggatatcctaattaccctgattcaatcattacacattgcatacatgtatcaaattatcactctgtacctcataaatatgtataattattacgtcaacaaaaaaaggaaaaaaaagaaaattaagacaacccacataatggaagaaataaaatatctgcaaattatatatatctgataaatatttaatatttataatatataaagaactcctacaactcaagaacaacaacaaaacaacccaattcaaaaatgggtaaaagccttgaatatacacttatctaaagactatatacaattggccaataaagacacgaaaagatgctcaacatcactagtcatcagggaaatataaatcaaaaccacaatgtagaatgtagacaccacttcatatgcactaggatggctagaataaaaaggtaataacaaatgttggtaaggatgtgaaaaaatcagaaacctcattcgctgctgttgggaatgtaaagtgatgcagccactttggaaaacagtctggcagctcctcaaattattaaatacagagttaccgtatgacccaggaatattcctcctgggtctataaccaaaaaaatgaaaacatatatccacataaaaacttgtacatgggcatttatagcaacattattcataacagcaaaggtggtaagaacccatatgcccatcatctgatgaacaggtaaataacatgcggtattatccatacactagaatattatctgcccatacaaggagtgacatccagctacatgctacaaggatgaatctcggaaaccttatgctaagtgaaagaagccagtcacaaatgaccacagattatgattccatgcatcggaaatgaccagaatagggaaatctatagagacagaaagtagattagtggttgggtggggctgggaggacaggtagtacactactttcccagaactactggaacaaagtaccacaaactggggagcttaaacatagaaattgatttcctcacagttctggagactaggactctgagatcaaggtgtcagcagagctggttctttctgagggccctgaggcaaggctctgtcccaggcctctctccttggctggcaggtggccatcttctccctgcgtcttcacatcatcttttctctgtgtgtgcccatgtccaaattttgattggctcattctgggtcatggccaattgctatgcacaaagtgaagtctacttccaaaagaagggaagagggaacactgactaggctaaacttatagtcattttaatgtccgcttttcctatgagattgtgaacacacagaagtagggtttttatctacattgtgcaaagtttaataagaaaaatagaattcaagagaagcagttcaatagcaggaatttaatatgggaactaattacaaggtttagggcaggactaaaaagccagttgggatggtgagccaacccagagattagcaacagtgggaccccatctacctaccacccatgaagctggaaggataaaggaggggctattatcagagtccacaagccagtgtcagagtccttggctggagctgggaccaccctagagacactgtgcaaagcagaaaacaagggggaaaaaccctgacttctcccttcctcccacctttcaatctcccactagtgcttcctactagccatacttggccagagacagtgacaaggaacactgcaaaatgaagtttgtaggaatcatctccctctgagacagagaaatatggaagggtagaaaatgaatcagaggataaagagaaaaaaccctgagtactatcttatttatctttgtatctccagtgcctaatctgtctctcaaaaaaggaaagcaattgagagaaactgaaaactccaattgaaatgaaagaatggagaattactggactagaagagaagagaaaaatttattccgcatagagtaaacaagaatggattcacaaaggacgtgatgaatgaaaagctataatcagcaaagatttgccagagaaattaaaaagtggtaaactcagccacgctgtacaacctgaaggcacaatgcatgaaaacgtttcaagaaatgacaagatttgaagtcaaattctaagtgcttttccagaatctctcaagacgattatatagctaccccattttattaaataaaatggaaacttactaaactttccccttgtattaaactaacatatgtcctaatagcaaacgattctggaattcctagagtaaaatatatttcgtcaaagtgtattgctcttttaatattctgctgacctccttttgctatttaggatatttgtatacacatcacacgtaaatttggtctatagtttacatctacgggcttatactgttctttttttcatttttttaaaatttccaacccccagtatccatatactgctctctatcagggttattttaactttgtaaaatcagctgagatgctttccatgttttttttttttattttctgccacatttgaatagcataggagttaccaccatcaaccttggattatttaagcattcacgattccacgtgtggattttttattcagagtctttcttgtcattcctgctatcagcacagaacccaatctcagctttccagctatactctcaccccatggaatttgcagatgaagttcaaaaggacctttgcattatcctgcctcgccctcttcccccttcatttagacatcaccttcttctagaacgtcttacctgacatgccctgctcccaacccctgctgcccaattgtgtgctctcccgtgtcctggcctgccatcctctttagtaattgcctgctccctcatctgtctccccacccagacattaagctgaatagactggatttgtgtcttgtccatcactataatctcagcacctagtacctagtaggtacttaccatgtattcattagcaaaatgttatgtataaccttgcaccttaaaaacaagagaaggaagacaaaattaagtcttaagactatggtttagaacatggatcagaaactacagtctgcagcccaaatccagaccaaatgaagagaccatgttcatttacatacaacctatagcagctttcacactacaggagcagagctaagtagttccaagggaacacacggccctgcaaagcctaaaatatttactctatagctcttcacagaaaaagttttcagatccctcgtttagaactcttgttcatatgcaatttcactaaaccatagttttttgggtttgtttggttttttttggcaaaaaggaatgagccgatccagaaaaggttgaaaagaatgaatcattactgctgaaagaatgtgcacacagtccgtcagtattctgctgccatgctgacacccatccaatagtgtcatgagatgcagcagctactactgtgttctcaatgccgagtccacccactccataaccatgtccaagcaatcttgggaacatcatcaccatgcttgtttatccttaaggtattgcctcacatacagcagtggctggtcataaagtcaaatgacactagtggccaggaggtcaagagaatgagtgaggacaggtgggtaggcagcccaggccctagcaacagcaggagctcacccctcagtcactctagccaggactgaaatacttttcaccctttcaagagagactaggaatctggatttttatgtgaaatatcttgattactaaatgttgtcaacagacatgtcaaaaggtaaaactaagtaagttcatggggcagattgactattcaggttatagaattaaggattcttatccaacacagataccaaccaaaaagctgacgtataacatattaggagaaactatgtgcactgtcgaaacatcaacaaggggctaatgtctaaaatagtctatattggattccagttgaaacatggggaaaggacatgaacaggcaacttatgtcaatggaaactcaaaaagataacaagcatatataaaagcattctcaaattcagtagtaaacagacagatgcaaataaaaagagggaaactgctgccgggcacagtggctcacacctgtaatcccagcactttgggaggccgaggcgggcggatcatgaagtcaggagatcgagaccatcctggctaacatggtgaaaccccgtctctactgaaaacacaaaaaattagccaggcgtagtggtgggcaccagtagtcccagctactcaggaggttgaggcaggagaatggcatgaacccaggaggcggagattgcagtgagccgagaccatgccactgcactccagcctgggcgactgagtgaaactccatctcaaaaaatataataataattataattataataataataaatagtaaataaataaaaagagagagactgctaaagtctagaaagttgaatgatgccaagcgcatgcaaagatcagggccttgggatggccgggtgcagtggctcacgcctgtaatcccaccactttgggaggccaaggcgggcggatcatgaggtcaagagatcaagaccatcctggccgacacagtgaaacccggtctctactaaaagtacaaaaaaatatatatatatatatatattattatattatatatatatatatcagagccttgggaatccttgtgtgctgctggggaaggtagtggtgcagccacccttgacagcaatctggcagtacttggttatattaagtataggcacacaccacgaccaggcagtcctactcctgggtctaaatcccaaagaattctcacacaagtccataaggagacatgtacgaggctcattcagcattactgggagtgggaatcaacctgggtgtccatctacaggagacgagatggacaaaatgtggtggatattaagaccagaatcaccaagtaacagagatgggtggtgagtgacaatcctaagatacagaataaaggctagaacatgatgccattcatgtaaattaaaaatagatgcacacaaagcagtatacgcgtgacccttgaatagcacaggtttgaactgcctgtgtccacttacatgtggattttcttccacttctgctacccccaagacagcaagaccaacccctcttcttcctcctccccctcagcctactcaacatgaagatgacaaggatgaagacttttatgataatccaattccaaggaactaatgaaaagtatattttctcttccttatgattttctttatctctagcttacattattctaagaatatggtacataatacacatcacacgcaaaataaatgttaattgactgtttatattatgggtaaggcttccactcaacagtaggctgtcagtagttaagttttgggagtcaaaagttatacacagattttcaactgtgcaggcaatcagttcccctgaccccctcattgttcacgggtcaactgtatatacacaaaagtattatatgaacctcattagaatagctgtctatagggagaagagaatgagagtgggataaaacggaatgaacaaataaaccaacaaatgcattaacaagcaaaacaacagaggggcttgcatgggccagtgatgataaagggctaagaatgagaatataattaattcaattcctcacacctgaggtctaaaaccaaggaaagggagggccaggcgtggaggctcacgcctgtaatcccagcactttgggaggctgaggcgggcggatcacaagattaggagtttgagatcagcctggccaacacagtgaaagcccatctctacaaaaaatacaagaattacccaggtgtggtggcacatgcctgtagttagctactctggaggctgaggcaggagaatcacttgaacccaggaggcggaggttgcagggagccgagatcacaccattgcactccagcctgggtgacagagtaagactctgtctcaaaaaaataaaaaaaataaaaaaacagagaaagggaggaaactagatccaggctgactagatacagcctttagagttagaaaagatgatttgacaatctaagcccacactcagattgaatgaaattgaaaagcctttcaaactaaaacatttaattacaccatctgctgcagacagaactcagacaactcaaacaggtaatgtcagcgtggtgttttatatcaccaccctcaacacagaataaaaatcagctgcatgtgaagcagtgactagaatgaagaaaaggctgcttcttacttccttctagtggttctttccgaaaacattaataggcaccagctctatgcatgtcaccctgcagggagacatggggtatataactatgacttactgttcattcctcaaggaattcccaatcttgtggaagattatacacaatgaggcaacaaaaactatccaataaaaccacggaaaagaagccagtgacaaagaagccagtgatgaaaggccctgtgagcagagctgatggccatttggggaagaaagaccaacatggatgggggtgatcagggtggctccgtgggaaagctggaagagaagtggcagatctctgagctggatgatgggccactaccatctgtatatggctaattaaagaccatgtgtggattttttattcagctctttcgtgtcattcctgctatcagcacagaacccaatctcaactttccagctatattgagctaaacttctcacctcatggaatttgcagataaagttcaaaaggatccttgccttttcaaaataattttgaatggttgagtagtccctctgtgctctctcactgacaccctctcaaggctgctgagcacgtgccatgctatggctttctccaacatcaggaaatgttctccactcagtttcaccttaatacaaatgtgttctctcttcagagaaggcaaaaaaattcatgaccatctgactgggagaagtcatttctaggtaaagtgtccatctttttctgaggaacacaggaggaaaatcttacagaaaagagttaacacagcaggcctaagactgctttttaaaataaataaataaataaataaataaataaataaataaataaataaataaataaatgaatgatagggtcttctgtattggccaggctagtctcaaattcctggcttcaagagatcctcccaccttggtctcccacagtgttgggattatagacatgagccattgtgcttggcccaagactgttattcttaaaaagtctcataaaaagcatggttaatccttggctggcacctgggaacttagatttcagaagggttcccaccatccaacctggaaagagggactcactgtgcctaaattattgtgtggtttatgctgaactcctgcttttcttcaggtagcgtggaatgtggtatgtgctgggcaaagggggcctgcatgaccagcccccaataaaaaccctgggtgttgggtctctagtgagtttccctggtagacagcatttcacatgcgttgtcacagctccttcctcggggagttaagcacatacatcctgtgtgactgcactgggagaggatgcttggaagcttgtgcctggcttcctttggacttggccccatgcacctttccctttgctgattgtgctttgtatcctttcactgtaataaattacagccgtgagtacaccacatgctgagtcttccaagtgaaccaccagatctgagcatggtcctgggggcccccaacacagaaataaattataaaagaccaaggactgggcatggtggcccatgccggtaatctcagcgctttgggaggccgaggcaggaggaccagttaagcccaaaagttcaaagttacagtgacctatgactgcgccaatgcactctaacctgggagacagagcaagaccctgtccccaaaacaataaactaaacacatacttctgccttccaagtgtcttaaaattcaatggaatggtagaaacatttttaaaacactaaatcaaaagaaacctggaaaacaagagtgccgatggccaactaaaatgtctaggaaatttctgaaaagtaaaaagtactcagaaccagattacctgagcaaaccatagcccaatacaagcttgggaggaggctgttatgcagaaggaaatggtaacaggtttccaggaacagacttgtaacagcagatagaacagcagaggtagaacctgacaaggtgattacctggggaactgcagtctgaatgaccaggactgttggacccttcccctcacatggaatacacacgccactcagcagcacaccacagctcttcaacaatcacaggaggcacgctacgcctagtaagacaggaaaaaaggaattctcaaacttcgaagatgaacacataaagaatcaccaagtttttattcagtatgatgaaacagggacactgaatcaacagaacacaaacccaagcaaagataattactagagcacatagaagaaattattagatattcttgggaagacctaaggggacattataaagagcaagcagttggtatgtgacgatctttgtgatataccaagaaataaaaacacaggatgaagaccagatagagaataatgctactatttgtgcaaaaaaggagaaatggagaatctgattcatatttgcttgtatttgcatgaagaaactttggaaggtacataagtaactaacaacaatggttacctacttgtaaggcgagagaagtaagaggacaggaatggtgggaacaccttttgtgtccggaattggtgggttcttggtctgacttggagaatgaagccgtggaccctcgcggtgagcgtaacagttcttaaaggcggtgtgtctggagtttgttccttctgatgtttggatgtgttcggagtttcttccttctggtgggttcgtagtctcgctgactcaggagtgaagctgcagaccttcgcggcgagtgttacagctcttaagggggcgcatctagagttgttcgttcctcctggtgagttcgtggtctcgctagcttcaggagtgaagctgcagaccttcgaggtgtgtgttgcagctcatatagacagtgcagacccaaagagtgagcagtaataagaacgcattccaaacatcaaaaggacaaaccttcagcagcgcggaatgcgaccgcagcacgttaccactcttggctcgggcagcctgcttttattctcttatctggccacacccatatcctgctgattggtccattttacagagagccgactgctccattttacagagaaccgattggtccatttttcagagagctgattggtccattttgacagagtgctgattggtgcgtttacaatccctgagctagacacagggtgctgactggtgtatttacaatcccttagctagacataaaggttctcaagtccccaccagactcaggagcccagctggcttcacccagtggatccggcatcagtgccacaggtggagctgcctgccagtcccgcgccctgcgcccgcactcctcagccctctggtggtcgatgggactgggcgccgtggagcagggggtggtgctgtcagggaggctcgggccgcacaggagcccaggaggtgggggtggctcaggcatggcgggccgcaggtcatgagcgctgccccgcagggaggcagctaaggcccagcgagaaatcgggcacagcagctgctggcccaggtgctaagcccctcactgcctggggccgttggggccggctggccggccgctcccagtgcggggcccgccaagcccacgcccaccgggaactcacgctggcccgcaagcaccgcgtacagccccggttcccgcccgcgcctctccctccacacctccctgcaaagctgagggagctggctccagccttggccagcccagaaaggggctcccacagtgcagcggtgggctgaagggctcctcaagcgcggccagagtgggcactaaggctgaggaggcaccgagagcgagcgaggactgccagcacgctgtcacctctcactttcatttatgcctttttaatacagtctggttttgaacactgattatcttacctattttttttttttttttttgagatggagtcgctctctgtcgcccagactggagtgcagtggtgccatcctggctcactgcaagctccgcctcccgggttcacaccattctcctgcctcaacctcctgagtagctgggactacaggcaatcgccaccacgcccagctaattttttattttattttttttttagtagaagcggagtttcaccatgttagccagatggtctcaatctcctgacctcgtgatccatccgcctcggcctcccaaagtgctgggattacagacgtgagccactgcgccctgcctatcttacctatttcaaaagttaaactttaagaagtagaaacccgtggccaggcgtggtggctcacgcctgtaaccccagcactttgggaggccgaggcgggcggatcacgaggtcaggagatcgagatcatcctggttaacacagtgaaaccccgtcgctactaaaaatacaaaaaattagccgggcgtggtggtgggcaccggcagtcctcgctactggggaggctgaggcaggagaatggcgtgaacctgggaggcagagcttgcagtgagccgagatagtgccattgccttccagcctgggcgacagagcgagactccacctcaaaaaaaaaaaaaaaaaatagagacccggaaagttaaaaatatgataatcaatatttaaaaacactcaagagatgggctaaagagttgacggaacaaatctaaatattagattggtgacctgcaaaaccagcccaaggaacatcccagaatgcagcccataaagataaagagagcatttccgctgggcacagtggtatggcaggggaattgcctgagtccaagagttgcaggtcacattgaaccacaccattgcactccaggcctgggcaacacagcaatactctgtctcaaaaaaaaaaaaaattaaattaaaaaagacagaatatttgagagaaaaaaatgcttatttcaagaaacatgaaagataaatcaagatattctaattcccaagtaagaataattccagaagcagaaaatagaatagaggcaaggaaacactcaaaacttctccagtgccatagaaatgtgtattaatctttagaatgaaacggactaccaaatgctgagcaggaagaacaaaagagatccactcttaagccagtgtggtgcccaagcgcagtggctcatgcctgtaatcccagcactttgggaggccgaggcaggtggatcacctgaggtcaggagtttgagatcagtcaggccaacatggtgaaaccctgtctgtactaaaaatacaaacattagctgggtatggtggtgcacatctgtaatcccaactacttgggaggctaaggcaggagaatcacttgaaaccaggaggtggaggttgtagtgagccgagatcatgccacactcccagcctgggtgacagagcaagattccatctcaaaaaaaaaatccactcctagacaaataatagttaaattttagaacaccaaggagaaagaaaaaaaattgtaaagcttcagagaaaataaacattaactacaaagaaacgagagtcagacgcgtgcacttcttcctagataccagcagataaagcaatatctccaaaattcagaaggttttaacgtagaatcctatacccagtcaagaatattcacatggaaaagtgaaataaaaaacattgtttaaacatgcaagggttcagaaagtttaccattcacagaatccctgaaaacaaaaccaaataatcacttaaggactcattaagaaaacaaatgaaataaaagcaccaatgatgagtaaataatcagaaaaatttacagtttacctaaataactgtttatgcataatgtatgaaaacccaaaaatttaatatgggacagaattaaaatcatgataagattcttttttgctttactcatggagagttcacataaacagattatcttttaatagcaagagaaaaaaatgtttagatatgtgtgaaaaactaagggtaccaaaacagtgcaaattcatttatcatcaggaaaatccaaattaaaaccacagtatccaccagaataactaaaaggtaaaagacagaaattaccaagagttggcaagaatgtggagcaaccacatatacttctggggtaaataagttggtgcaaccggtactgaaaactgtttgctagtatctactaaaaccgagcacatgcacagactacaaccaagcagttccactcccagatacacactcaacagaaatgcacacactcactcaacaaaagacgtgtactagagtgttcatgtacttactattcataatagtccaaaaatgcaaacaaccaactgccaatcaaagtcaaatgtatatctatattagggatatatacaatggcatatacacagcaatgagaatgaaatgaaccagctcggcacagtggttcatgcctgtaatctcagcactttgggcgggtaaggcaggcagatcacttgaggtcagaaatttgagactagcctggccaacacggttaaaacctgtccccactaaaaacacaaaaattagccgggcatagtggttgcaggcctgtaattccagctactcgggaggctgggttgggagaatcgtttgaacccgaaagccggaggtcgcagtgagcggagatcgtgccactgcactccagcctggacgatagagcaagactccgtctcaaaaaaggaaatcaaaaatataaaataagatgacaggaataatccgcaaaagatcagtaatcaaaataaatataaatgggctaaagctacctattaaaagacaaagatttcacacccataaggatagctactatcaaaaaaagagagagaataacagatgttagcaaggatgtatggaaactgaaattctcacgcattgctggtgagaatataaaatggttcagcctctgcggaaaacactatgctgggtcatcaaaaaattaaaaatagaagtactacttgatccaacaattctacttctgggtatatacccaaataactgaaagcagggtcttgaagagatatttgtacacccatgatcatggcagcattattcataatagctatgatgtggaaccaacataaatatcctttgataaatatatggataagcaaaatgtggtgtatacattcaatggaatattaattagcaataaaaatgaagaaaattctgacacatgctacaacatggatgaaccttgagggcattacattaaatgaaataagccagttataaaaagacaaatactatatgaggtactatattagatactcatgcaaggtacctaaaataggcaaattcatagagacaaaaagcagaatggtggttgccaggggctgcggtaatggatacagagcttcaattttgtaagatgaaaaaattctggagattggttgcataacaatgtgcacacacttaacactggggaactgtaaacttaaaagtagtaaatggtaaaaataaaaataataaataataaattttatgttattttaccacaatatttattaaaagacaaagattaactaattaaacaaaatccagccataagctaatggtaagagtaacaattaaagaagacacagaaaattgaaaatcagtgactagaaaaagatattccatataaatgctaacaaaaagcaagtacagcaatataaagagaatgaacaaaaaaaaaattaaataagatggctcgtttattcccaaaaggtacaattcaccaagaagatacaagaattgtgaacctttaagcacataaaacagcttcaaaaatacaacatttaaagaaaaatatatattaaacatagaaatagtacaaaaacccctacaagaatcataatgggagtcttcaatacaactctccatatcaacaggtcaaacagagaaaaaaaataagttaaggatgcagaaaacctgaattaccatcaataaacttgagattaatatagaactgtatacccaatatactaagagttcagggaacagtcgtgactgacagtggactgcaaattaatctgttcttaatctttgtttttctttcagcactgtggcagaatagagatcctaaaaaccttccagctacaaaacatctttttaaaaatataaaaaaatacaaaaataactctgaaatcaatagaagacacatggtgaaaccaaaattctagaatacagggagaataaaggcattttcagatattacaaaaacagaaaattgatcattgctgaagtaatttctaaagaatgtacttgagggagaagaaaaatgttccaaagaaaagtatctgtgatacaagaaggaatggaaagtgaagaaatggtaaacaggtagataaagctaataaatgttgacctagaaaataacaaaaacaatagcaataatgtctcgttggaagggttgaagtaaaaatacaattaaggccaaatgtgaggtaagtggaatgaaagaattagaagtccttgccttgttcacaggactgattaaataaatgagccaggttttccattcaaacagttaaaacttgaacaaaataaactcaaattaagtagaaagataaaaaacagaaattaatgtcatagaaaaataaaaaatcaatagaattaatcaataaatcctggttaataaaagctggttctttgaaaggattaataaaataatcattaagcaagtctgatcaaaaaaaaagagaaaaggtaccaaaaaaagtactgtatcagaaagagaacatacagatacatacagatatgtaagagtctgttttcttacaccagaatactatatacaacattatgctagcatatattaaatttcaataatgttaatgattttctaggaaaacagaaaatattaaatttactttgaagaaacagaaaaactgagaaaaataaatgatcatgaaaaaaatgaaaaggtaattaaatactgatattaactgcctaaacaacaccagcagcagcccaggcagtctgcagtcaagttctgccaaacttgagggaacagataattcttctattccagagcatagaaaatgatggaaagtttcccaatttaatcagagaggacagcctgatccttgttatgaacacagataaaaatggggtaaactatatgccaaactcagataccaaaaccctaaataagatgctagcttattgatgtgaacaatccaaaagtgcattttaaattagcccagggttttagagaaagaaaatctagcaatgtgaccaccacttatgttaacaattttaagacgaaaatctacatgatcatatcaatgcatgctacacaaaagcatttgggcaaaaaacccaacacccacccttgactttttaaactcttagtaattaggcataaacagaaatgtacttaatgtgatagaatacactcggtgaagatacagagggaatgctccctaaaaccaagcccaagacaaagattcctatttaacctcaatagtcaacactgcagcgagagtaatctatggaagacaaggaaaaaagtaaaaacatgagagacatctgttgtttaacagacaataagatcacctacttggaagaggcaaacgaatcaagcgaaaaactattaaaactgagacaggctttagtatggaggctcagcttcagctgtagtttgggctaccaaattcaactcgcttgcttggagagttaatcctgcaaagctaatttctgttgaggtattaggattgacaagcctgtgctcctccctcctcccccatcttcaacactgaaataacacggtgtttggaactggataacagaatcttccaaaaacaaaaattgtcctgaagggctgacttgtgcccttactcaaaaaacactttatctgctgcctgcagctcctacagttgctggtggataagcctgccaaccagctcggcgtaattcttcctgcagagggcaaggaagagcactttcacaggaaaatttttttccgaactgtatgccgcttattacataaacttacgtgctggcaaatggagctccagcaaaataagatattcagagtcaaacttccttaggaaaaaaaaaaaaaaaaagcaagcacataacactaatttccttgcatgggcactggggaaggaggtcgttacttccgcacgcccgcaggtccgcaccaccgggaaacccacgggcaccgcgcgctgcccccgggccttccaggtgcactgcgccgcggcgccccagctgacccgggatgcgcagccctagcccttcccctgtcaccccggccaggaaggggcgggagcgcggcggacgccgagggcgaagggcttctcggtcctctgcaccacgcagcacccccaaggcacaacagggagggtgcgggaggctcccgagacccaggagccggggccgggcgtgcccgcgcacctgtcccactgcggcgagggctggggtcgcctccagggccgcagctgtcgggagccacctggctctcagtcccgggtccctgcgacaaccctcgggcccggaggggaggaggcggccacctgccgctgccacctgcggcaccggtcccaccgctccgggccgggcaggacaggccaggacgtccctcctgggctggggacaggacacgcgacgaggggaccggggcccccgcggcgaagacgcagcacgccttcccagaaaggcagtcccgtgcccccacgacggactgccggacccccgcgctcgcccgcccatcccttcagaccacgcggctgaggcgcaaagagccggccggcgggcgggctggcggcgcggctagtactcaccggccccgctggctcagcgccgccgcaacccccagcggccacggctccgggcgctcactgatgctcaggagagggacccgcgctccgccggcgcctccagccatcgccgccagggggcgagcgcgagccgcgcggggctcgctgggagatgtagtacccggaccgccgcctgcgccgtcctccttcagccggcggccgggggccccctctctcccagctctcagtgtctcatctccctatctgctcatcctctggtcgcacataatcgatgtttgggcgtcccaagccagatgtggaccccatttccgcactctacactggaggttttctaagggtggtgcccggaccagcagcttcagcctcatctgggaacttgagaaaatgcagattctccgtcccacccagcctattcggtttttcctgcactaaaaccatgaaggtggggcccagcagtccacattctcgcaagcccgtcaagtgattctgaggcgccctccagtttgagagctatgctcacggcctcacctccgccccgcaaggagcccggtcttgcctgtggcgctagccgcacacggacacctcatcctgcggggcccgcccccccgctgcaccctcaccgcccaacgcctcctccgggatgcagcggaggcgcctggaagtcggcaaggtcaacatccccctcagcatcttccctaccctcacggctcctcctccaggggtgcctcatggccaggggttagaaagagccactgtgtttcttgacatggaagtggcctaagaccttaatgaaaactgcaggagtggaatgacagaacctttggtcatacttgagggcgtgaagctcaaatgaggaggaaggaaaggatccagggagaataaccaaccctggcaagttgtggcgcccaggtagaggggcgagcctaggctagcggttctcgaccagggccggtgttgcccctcctcgccgccccgcgtacatttggggaggtctggagacatttttggttgtcatgatgcgggagttgctactgttgcctaagtgggtagacacgagggtgctcctcaacatcctacctgaaggacaggactgccccacaaggaagaatgatccggccccaaataagaaaccctgggctggtcagcaacaacccctttgttctgagaagagaggaggaaagaataaaagaagtggggtgaagttttggtttggtagaggaaacttgaagacattttcactggaaaggaagagaggaagaggagggagatgtctgtaaggacgagcaaaccgggtgacagctgatttcctcatattgaagtaatgagtcctagttataataaattcctaataaaaacccagtttatccctgcaataaacttgtcttttttttttaaatatactgcttgattctgtttgctaatattttatttacaggctttgcattgatatgcaaaaatgagatgggcaataattttctttttgaatgtctaatgttgtttggtttcagaatcaatgttatgctcacatcataaaaaatttggaaccgaggcaggaggagtgcttgaggccagaagttcgagaccagtctaggaaacacagtgagacccccccatctctacaaaaaaaaaaaaagaaaaaaaaatgggcatgtttgctttttccttttactctgaacaatttaaggagcattaaaattatctattctttgaggtttgatcatttcccagttaaaaatgttcctcccagcctgatgctttctttggggagggtaaatcttttaaggctagaaaagtttcttctgtggcaattttattatttacattttaaaaattattctagagttaattttgataaagcatgtatttcttaaaacaaattatcctttttttccagatgttcaagtgtatttgcataaagttgaggaaagtagtcttttgtgaatcttttaacttctcccaaatatcttattttgtgtatttttgcttctttattttgttaacttttaaaagtgtatttttttttcaaagaatcagctcttaggtttatgtttttggttatactggagcttttttcttcttctttttaaaatattttttctcctttattttttagacgtattttgatctaacgtaatcggaagaaggtaaattagaatcttttgttactattgtgtttttatttctccttatttctctgaagtcctgctttataaatagtaccatgttatttgtgcataaatattcatttgtcttatattcttgggaattttcccacttcatcataaaatgaccttccttgtctcatttaatgtgttcaaactttgccctgaatttaactttgtctgatattttaccatcctgctgaattttgtttgttaccccaaacaacctttgctgttttcgtcttttctgaaccctttattttaggtaatcccttgaattagagcactaagttttgctttgtgattaaatctgaaaatctttatcttgccatagatgagttgagccctattcatgtgacagctatattatgctgtttcatagcccttttggtccttttttcactcttgcattgcatattttgtgtttattgtgttttgtgtttcttctgataatttggaaggtttgtatttttattcagggagttgccttataatcatactccgcaatacacatcgtcctcagtttcttcagactgtctgttaactccctattctgaataaaaatgacattgtaatttccctcttttttctttaccccttttcttctcctcacctaatgtaaatgattttatccttctttagtatttgcttttttaattaactacatttataaatatctttatcacttgatttttaaatcagctttgaatgagatatttggattcctagatataaaagatgttaattataccatttccacgttagtaggtttataaaatcatacattctgctgtgtaaccataatcccacgtttgttttagttccactcctacagttaaaagattcagaagtattattaacagttattttgccatagttttttccccaacccattttgtggtaagttatgatcctgctttagtttcttaagaataatttatagagcagagtgtggtggctcacgtttgtaatcccagcactttgggagacaagaggtagaaggatcgcttgaagccagcagttcaagaccaccctgagcaacatagtgagaccttgtctctacaaaaaattttaaaatttagccagacgtagtggcgtgtgcctatagtcccagctactcaggaggctgaggcaagaggattgctagagcccagaagtttgaggctgcagtgacctctgattgtgccactgcaccccagtctgggcaagaaagtgagaacctatctctttaaaataacaataataacttatgaaaattatattccctgagtttttcatgtttaaaaatatttgttgcctttatcctgtaaaagtttgagtataaattcttgggttatactttatttattgaagaatgtataagtattgtcttctagaattgagtgttgctgtaatgaaaccagaagtcagcctggtttatttttcctcagaaatgaggtaattgccggccggacaccgtggctcatgcctgtaatcccaacactttgggaggccgagacaggtggatcacgaggtcaggagattgagaccatcctggctaacatggtgaaaccccggctctactaaaagtacaaaaagttagctgggcatggtggtggacgcctgtaatcccagctacccgggaggctgaggcaggagaatggcgtgaacctgggaggaggagcttgcagagagctgagatcgcgccactgcactccagcctgggcgacagagtgagactccgtctcaaaaaaacaaaaaaaaaacaaagaagtgaagtaattgccatgatgctccaagaattatctctttgtctatgaaatccagaaatctcactgttatacattttggaattattattctgggccaatatttcctgggacacaatagattgactctatagatttaattttttttttttttttgagacagagtctcactgcaatctcagcttactgcaacctctgcctcacgggttcaagcaattctcctgcctcagcctcccaagtagctgggactacaggcgcgtggcaccatgcctggctaatttttgtctttttagtagagacagggtttcaccatgttggccaggctggtcttgaacgcctaacctcaagtgatccacctgcctcagcctcccaaagtgctgggattacaggcgtgagccaccatgcccagcctcaattcctctttctatctggtaatttttctgaagttgaaaacatttgttctaatacgttatttcagtgttcttctaagatgtgtaaagcaccctattcccaggtcagcccccatcttgctagtgagctcggctggttcttcacaagagctctggttttctcctgcttaatctcaagtacctctgtcagcctccacctggtttatgatttggagttttttggtttttgttttttgtttttgacagagtcttactctgtcacccaggctggagagcagtggcataatctcagctcactgcaacctctgtctcccaggtttgagcgattctcctgcctcagcctactgagtagctgggattacaggcgcgtgccaccacacccggctaatttttgtatttttagtagagatggggtttcaccatgttggccagggtggtcttgaactcctgacctcaggtaatccacctgcctcagcctcccaaagtgctgagattacaggcgtgagccaccgcgcctggcatggtttggagttttaatctgtagttttaataaagatagtgcttatgtttgtgtttcttatatttcttggtactcttgggtaatttgtaagatccccatatctacacaagaagtccattttcaattcttttcttcagactgtttattttattttattttattttatttttatgtttgagatggagtctcgctgtgtcacttctggaggctggagtgcagtggcgcgatctcaggtcactgcaacctccgtctcccgggttcaagcaattctcctgcctcagcctcccgagtagctgggattacaggcacctgccactttttaatttttttagagacagagtctcgctttgttgaccaggctggagtgcggtggtgcaatcatggctgactataacctccaaatcctgggctcaagtgatcctcctgcctcagcctcctgagtagctgggactacaggcacatgccaccatgcccagttaattttaatttttttgtagagacagggtctccatatgttgcccaggctggcctcctactcctggcctcaagtaatcctcctacctcagcctcccaaattactaggattataagcatgagccaccatgcccagccttgttctactactttaatttcatatgttaggtgaccatgtaattgatcatccaaaccaggatactgtaagaatgaaagaggctgacagtagtatgatgctgggactagcattgtgcactgagattatttctgggaaagcaggagatacggtcaccctacttatagtgtgcttgtctttggattgttgaatttggagtttctatttgcaggcttatttcaactgggcagccttgatccgccctgcccagcaatgctaccgttctctccaccgggtctctgggaccccttcagtcactatacttagctcagttccccaccctcccactccctaaaagcgtaaccaggaatcctgcctcaggtctactgccgtcttccgtgggctgtttcagttcctattacccagagtcaaactcccagcattccctacctgattccagacttggagtccagagctttaacctcttcaggccaactccccactttgcatttctgtccctatatcttagtccatggagatacatttcatgtctttgagtctacttacaaagtaaattttgctgttttttaattttttttttgagatggagtcttgccctgtcacccaggctgtggtgcaatgacgccatctcggctcactgcaacctccgcctcctgggttcaagcgattcatctgcctcagcctcccaagtagctgtgattacagacaggcaccaccacgcccagctaattttttttatcttttagtagagacagggtttcaccatgttggccaggctggtcttgaattcctgacctcgtgatctgcccatctcggcctcccaaagtgctgagattacaggcgtgagccactgtgcccagccaattttgctttttttatatttcattgctatatgtttagaggataagtttacagtgctatatgcattcccaaatattagaccaaaaaaatctccaaaaaattagaaagaaaatccaaaaaatctcaaaaaataccaaaaagcaacaatctcacagaccatactcactgacccccaataaaataaaattagaaattaaccacaacttaacaaaataaagtactcaagtcagagaggaaagaggaaataaacatcaaaattacaaagtctaggcggtggctcacgcctgtaatcccagcactttgggaggccaaggcgggcagatcacaaggtcaggaattcgagaccagcctggccaatatggtgaaaccccgtttccactaaaaatacaaaaattagccaggcatagtgatgtgtgcctgtaatccagccacttgggaggctgaggcaggagaatcactgaacccagggagacgaagattgcagtgagccaaaatcgtgccactgcacttcggcctgggtgacaaagcgagactccatctcaaaaaaaaaaaaattacaaactctttagatagaaattttggtgtttttttttgagacggagtctcactctgtcgcagaggctggagtgcagtgggactatgtcagctcaccgcaacctccatctcctggattcaagcaattctcctgtctcagcctcccaagtagctaggattacaggcgcccaccaccagacccagctagtttttatatttttagtagagatggtgtttcaccatgttggccaggctggtctcaaactcctgacctcaagtgatccacctgcttcagcctcccaaagtgctcagattacaggcgtgagccaccgcaccccacctagatagaaatttcaacatgaggccgggcacaatggctcacgcctgtaatctcagcacttcaggaggctgaggcgtgggaggatcacttgggcccaggagttcaggaccagcatgggtgacagagacagaccctgtctctatttatttgaaaaaaaaaaaaaaaaagagagagagaaagaaatttcaacatgaaaagtatctctcaaacccttcgagatgttggcaaaaagcgactcaaaggaaaatgtattactgtgtgtgaatttgcttgaaaataagaaagaggccgggtgtggtggctaacacctgtaatcccaacactctgggagtccgaatcaagtggatcatgaggtcaggagatcgagaccatcctggctaacatggtgaaaccctgtctctactaaaaatacaaaaaattagctaggcgcggtggctcatgcctgtaatcccagcactttgggaggctgaggcaggtggatcacctgaggtcaggggtttgagaccagcctggcctacatggtgaaacctcgtctcttctacaaatacaaaaattagctgggcgtggtggtgggtgcctgtaatcccagctactcagaggctgaggcaggagaatcgcttgaacccgggaggcggaggttgcggtgagccgagatcgcaccactacactccagcctgggcaacagcctgggtgacacagtgagactccatctcaaaaaatacaaaaaattagctgggtgtggtggcctgcgcctgtagtcccagctacccgggaggctgaggcaggagaatggagtgaacctgggaggaggagcttgcagtgagccgagatcccaccactgcactccagcctgggcgacagagcaagactcttgtctcaaaaaaaagaaaaaaaaaggaaaaaagaaccctgataataaagaaaccaaatgttcaactctcaaagctcggacactttaaagaaataattaataaaggcagaagttaaagggaggatgataaagcaattttttttgttggtttttttgagatggagtcttgctctgtcacccaggctggagtgcagtgatgcgatcttggctcactgcaacctctgcctcccgggttcaagcaattctcctgcctcagcctcctgagtagctggtactacaggtgcgcgccacctggcccagctaatttttgtatttttattagagacggggtttcaccatatttgttaggctggtctcaaactcctgatctcaggtaatctgcccacctcggcctctcaaagtgctgggattacaggcaggcgccaccgcgcctggcctaaagcaaaatattggttctgtgcaaaaggtcaataaaaagagcaaacgtttacaaactggagccagcacccattcagctcagtgtgtctggagaaaaaacaatctcgcttcagaattcatgattacgcagccctttttgcttcctaaaaatcctactatgttgctgttgaccattctctctctttctctctctcttgctttctctccagaaaagctattcagacattctcctctttcctcaaacctccaacacttcctcctccatccttagcctcagctgctgacctcacttctaatcattgagaaaccaggagaagcatttaagagtgaacctccgcctccccgcacgggcaaaaccacccacccacagaattgtgccccaattctgcgtcctctcctctcaccatggatggacggtccaggctccgagccaaagccaggcctcccctggagctctggatccaccacctgcagcttctcaggcagggccccagcagctcccctgctcccttgtaccatcaatccctcccctcactgggtcactcccaacaatatatatatttagtgatgtttctcccatgtggtaaaatcacttagcctctctcctcccccagctactatcctatttgtttctttccattctctgcaaaacttctcaaagcattgtgtctatgtgctgactccatttatcttctcccgttctctgctgagtccttcccacagactctcaccccagttactccatgaaatgacctctgcactgccacatccaatggtgaatgttcagttcttaattttattcagtctttcagcagcatttgacctggccgatcactccctcttcttaaaaatacttttctcagccaggcgtgatggctcacacctgtaatcccaacactttgggaggccaaggcgggaggatcatgagagcccaggagttcaagatcagcctgggcaacatggcaagaccctatctctacaaaaactaaaaagtagccagtgtgatggcatgcacctgtagtcccatctacttaggaggctgaggcagtaggatgacttgagcctgggaaatcaaggctgcagtgagccatgattgcaccactgcactccagcctgagtgacagcgagaccctgtctcaaaaagacaaaataggaaacttttctcagcatattcctctgattctcctgctgcttctgtctgcacagattcagtctcctttgccggttcttcctcatcctcctgatctcttgaccttgaagtgccccagagtacagtctttttttttttttttgagacgcagtctcgtctgtcacccaagctggagtgcaatggcgaggtctcagctcatgcaacctctgcctcctgggttcaagcgattctcctgcctcagcctcccaagtagccaggactacaggcacatgccaccatgcccagcaaattgttgtatttttagtagagacagggttttactatattggccacgctggtctcaaactcctgaactcgtgaaccacccgcctcggcctcccaaagtgctgagattacaggcatgagccaccacacccggcccagagtacagtctttagacggcctctctacctatacttgctcccctcataaactcctcctgcctcatggctttaaataccatcggtagactgatgactcccatatttctcttttttttttggagacggagtctcgctcagtcccccaggctggagtgcagtggcgcgatctcggctcactgcaagctccacctgccaagttcacaccattctcctacctcagcctctccagtagctgggactacaggcacccgccaccacgcctggctaatttttttgtatttttagtagagatggggtttcaccatgttagccaggatggtctcgatctcctgacctcgtgatccgcccatctcggcctcccaaagtgctgggattataggtgtgagccaccgtgcccagccgatgactcccatatttctatctcttgctgtgtgggagttctcctcagaactccatactcataaatccaactctcataaatagtatctcaaatgggcaatatgctcaaaagtcaattcctacttttctccctaaacttgctttcctgcagtctccaccatcttaatgtccaatctaacattaggaggcaaaaactttgaagtcattcttgactcttctctattacacaccctatccaatctttctgcagatccagtcgacccccaaatccagttagctctcatcatctcccctgttaccccctggtccaggccatcttcctctctcacctgaatcactgcagcattctcctcactggtctctttggttctgttttcactccaccttagcatagtctccacagagcagtcagagggatccttttaaagtgtaattcccatcctgtccctgctctgctcaaaaccctgtcgtgattcccgttttaatctgtcagattaaaagccagagtctttccagtgacctacatgatctgcctattatcacctcccacttctttccccttgctcactccactccagctctgcagctgtcctttctgtttcctgaacagcccagattttgcttctttagaacctttgtatttgctgtcccctctgtctggaatgtttttccaggaagtcacctggctctctcctgcacttccttcctgaccaccatgtttaaaaatcactcaaacacacttcaggccggacatggtggctcacgcctgtaatcccagcactttgggaggccaaggtgggtggatcacctgaggtcaggagttcgagaccagcctggccaacatggtgaaacttcgtctctactacaaatacaaatagtagccaggtgtagtggcacacacctgtaatctcagctactcaggaggctgaggcaggagaatcgcttgaacccagaaggcagaggaggtgcagtgagccaagatcacgccacaacaccccagcctgggtgacagagcaagaccccatctcaaaaaaaaaaaaagaaaaaaaaatcacacaaacacacttctcttcatattccttttccaagttttatttttctccagaatactttacattgttttaatggaagttctccgtttccccccaactagaatggatacttcctgcaggtaggcactctagtcctcccatccaagtactaaccaggctcaaccctgcttagcttctgagagcaggggagatcaggcctgttcagggtggtatggcccaggaattttgattctgttttattcattgctgttctgttgattctcttttgttcctcctcctagtgctgagaacactacttgtacataataagcattcaataaatatttgttgaatgaatgacttgttgaatgaattaatctcagaaatgcaggactggttctacattagaaaatttttcaaggtcattctctgttgtcgtaacacattaagagaggaaaattttgtactctaaatcatttgataaaatacatactgatttctgttttcaaaaactcttagtggctgggcgaggtggctcacatctataatcccagcattttgggaggacgaggtgggcggatcacttgaggtcaggagtttgagaccagcctggccatcatggtgaaaccctatctctactgaaaatagaaaaattagccgggtgtggtggcgcatgcctgtagtcccagctacctgggaggctgaggcaggagaatggcttgaacccgggaggcggaggttgcagtgagccaagatcatgccattgcactccagcctgggtaacagagtgagactccatctcaaaagaaaactcttagtgagtttaggaatccaaggaagaccctcaaactaaatagataatctagctaccagaagccttcagtaaaccttaacactccatggtgaaacattagaaacattcctactaaaagacaggctaagaatgcctgcaatcttcacggctagtccaagaagtcaaaaagaagaaatgagcgctgatttaaaaaaataaacaaacaaaaaactaccgatgcagaggctggcagcaaggactgaaggactgtacagtacttgcctggagcaggcggatggccacacccctgcgaagcctgctcagctggctgggggacgctccagtgtgtgagtggcaggatgcagggtacttcctctgccagggagttgcactggggagatcctcccccactcacactttggcagctggggctttggaatgtgacttagcttctgtcaaagggtcaatccaccctttgatatatgatgcaaaggcgaacatatgatgcaaaggtgagagaacagcccaaattaggacttttaccacagctgtggaggtggacagcgacagtggtgggccctggccagacttttcatgctcaaaggtggtggttgttcttcctacttcttgtccctccagggcttcctttgcctgtgtgctgaacctgcttcttttaattttttttaacttttttaaatttttaattgttttaattaaaacaaattttgaaaactgtctgaacctgcttttgaaccctgctatgatttgaatgtttgtcccctgccaaactgattttgaaacttaatctccaaagtggcaatattgagatggggctttaagcagtgactggatcatgagagctctgacctcatgagtggattaatggattaatgagttgtcatgggagtggcatcagtggctttataagaggaagaattaagacctgagctagcatggtcgccccttcaccatttgatatcttacactgcctaggggctctgcagagagtccccaccaacaagaaggctctcaccagatacagctcctcaaccttgtacttctcagcctctgtaactgtaagaaataaatgccttttctttatgaattacccagtttcagatattctgttataaacaatagaaaacgaactaaggcaaactctcatgattctactgccatgccattccaataaactccctttatgcttaagagagccagagttggccaggcgtggtgactcacgcctgtaattccagcactttgggaggccgaggcaggtggatcacaaggtcaggagatcgagaccatcctggctaacacggtgaaaccccgtctctactaaaaatacaaaaaaattagctgggcgtggtagtgggtgcctgtagtcccagctactcgggaggctgaagcaggaggagaatggcgtggacccaggaggcggagcttgcagtgagtcgagatcgtgccactgcactccagcctgggtgacagaatgagactccgtctcaaaaaaaaagagagccagagtttatttctgttgcttgcaaccaagaaatctggctggtgcactgaagtttccataaataatagcaatttaaagactctttccaagccaggcaatgcctagccttgtgtagtccttgtggtaatacattcattcattcatttgttcaaccaactgtgctccagagactaagaatacaaaaatgggggccgggtgtggtggctcacacctataatcctagcactttgggaggccgaggcaggtagatcacctgaggtcaggagttcgagaccaacctggccaaaatggtgaaacccctactctactaaaaatacaaaaaattagctgggggtggtggcggacacctgtaatcccagctactcgtgagactgaggcaggagaatcacttgaacccgggaggcagaggttgcagtgagccgagatcgcaccactgcactccagcctgggcaacaagagcgaaactccacctcgaaaaaaaaaaaaaaaaaaaaagagggccggggctgggcgcagtggctcacgcctgtaatcccagcactctgggaggccaaggcaggagaattacgaggtcagcagatcgagaccagcctgaccaacatggtgaaaccccatctctactaaaaatacaaaaattatccgggcgtggtggcgcacacctctagtcccagctacttgggaggctgaggcaggagaatcgcttgaacccgggaggcagaggttgcagtgagccgaaatcatgccactgcactccagcctgggtgacagagtgagactccgtctcaaaaaaaaaataaaaaaaaaaaaagaattcaaaaattgtagagttatagtgtgcttctagtttagttgagaggacatctgtccttcaaggaaggctagaatctataccctgagtccttactgaaatcaatccagcagtcaaaacatgggaccaacgatcacagcagtaagataggaagagcacctttgtacatttagctcatgttgagataagccactgacagagctgaaggaagctcacagttctgggttccatcctttggcatttaaaaagaaaagtgctaagaaaattcggttggtcacggtggctcacgcctgtaatcccaacactttgagaggccaaggcaggcagatcacgaggtcaggagttcgaaaccagcctggccaacatggtgaaaccccgtctctactaaaaacagaaaaattagccgggcatggtggcgcatgcctataatcccagctactcaggaggctgaggcaggagaattgcttgaacccgggagggggaggttgcagcgagtgagagcaggccactgcactccagcctgggagacagagcaagactctgtctcaaaaaaaaaaaagaaaaaaagaaagaaaggaaaaaaagaaagaaaaaaaaagaaaaaagaaaattcaggccaggccaggcctggtggctcacacctgtaatcccaacactttgggaggctgaagcgagacggtgccttagcccaggagtttgagaccagcctgagcaacatagcgagaccctgtctctataaaaaaaaatttttttttggccagacgcagtggctcacgcctgtaatcccagcactttgggaggccgaggcaggtggatcacgaggtcaggagatggagaccatcctggctaacacggtgaaaccccatctctactaaaaaatacaaaaaattaaccgggcgtggtggcgggcgcctgtagtcccagctactcgggaggctgaggcaggagaatggcgtgaacccgggaggcggagcttgcagtgagccgagattgcgccactgcactccagactgggagagagtgagactccgtctcaaaaaaaaaaaaaaaaaaaaaaaattaattgtcaggtgtgctggcatgcagctgtagtcctagctactcgggaggctgaggtaagaagatcgcttgagcccaggagttcaaggctgcagtaatagtgcctctcactctaccctgggtgacaatgagaccctctctcaaaaagaaagaaaaaagggaaagaagaaaagaaagaaagaaagagaagaaaggaaggaagaaagaaagaaaaagaaaaggaaggaaggaagaagaaaaaaaaagaaagaaagaaaagagagagaagttcaaagaccaaagggtcaggatcccaaaatagtttttatgttttatttatttatttacttatttatttttgagacagtatggctctgtcgcccaggctggagtgcagtgatgcgattgcggctcactgcagcctccaaactgggctcaggtggccctcccacctcagcctcccgagtagctgggaccacaggcgcgtgccaccatgcccagctaattttttaattctttgtagagatgaggtctctatatgctgcccaggctggtctcgagctcctgggcttaagccatccacccgcctgggcctcccaaagtgctgggattacagaagtgagccaccgcgcctaatcgggtggtttgtttgtttattgacggggtctcgctgctgcccaggctggagtgccagtggctgttcacaggtgcagtcctggagcattgcatcagctcttgggctctagcgatcctccagagtagctgcagctgggattccaggcgcgccaccgcgcggggctcagaatgggtttttatattgagggttatgctgccacctagaggatatatgtagtaccgaactgtgtgcgcagggaggctgaggttgcagtgagccaagatgatgccagggcactccagcgtgggtgacagagcaagatttcatctcaaaaaaaaaaaaaaaaaaaaaaaaaaaagaattgaaagtaaggtcttgaagagatatttgtgcctgtatggtcatagcagtattaactttgacccactagctaaaacacaaaagcaacatgtgtctgtcagcaggtgaacggataaacaaaatgtggtatatatgtacaattgaatattattcagcctttaaaaaggaataaaaggctggatgcgggggctcacgcctgtaatcctaacactttgggagactgaggtgggtggatcacccgaggttaggagtttgagaacagcctggccaacatggtgaaacttcatctctactaaaaatactaaaattagccgggcatggtggcacttgtctgtaatccaagctactggggaggctaaggcaggagaattgcttgaactcaggagccggaggttgcagtgagctaagatggcaccactgcactccagcctgggcaacagagtgagactccatctcaaaacaaacaaacaaaaaattattatttccaaagaaacaagaccctgggtccatttcccagcccacacctgatgttgactcacaacacacagcctggtttgctatgagcctgcttcatttaattgtcaccttaacttcacatcaccctcaagtcctggaataactctttgctgacctttgtgtgctgagccatctccatgtcgctcaacgtgcagtccctctcactgcactgagtcaatagccagacgtggtctgactgcagggtcatccttggtggcttaggctgactcgggcatagcagggtgctctgagacctcaccgcatataggctttgcccccaataaactctatataatattcatattatgtggtctgggtgtgtgtagctttgcactgtcttctcgtgacagtgccctcaacctctttcccaggatttcctcctctacctcctcaagtcccactgctctgcaaagaccaaaagctgcagagtcccagctccctcctttacaccccacgacgcagcctcctctctcagaaccctttaaacagagtcttttactgcagatcccaagaacagccacacccctctctcccacccactccagacacacccaggtaattatagcacccagggtaactatgtagatggagtccctggaacatgtggatagtgccccctgggagtatgcaaaagcaacattgctggcacctgcagagaacagggtgacatccaggaatcagagcatgggcctctgggaggtagggatgtggccaggcaggctgccaaaaattggtagagcaaggccacaggatctttctgaccttccttccaaacagaggctcctgtactggtgatccctgtgttgattgaccactcccttcctgggggtcgtggtctctgtcccagttgcccggacttctgtgagtgtcctactgaggtccttttcatgagaagcatgctgtccttccacctgctgggagcaagagtgacaacttcaatactataatagcagtggcatacagagaagaagaaagatgaagtggcaagaaaaacaggcttccaagcaggagtttttctataaaaacaaaaacgtttacaagcaaactttttataaagggctagatagtaaatattttaggctttgagagccacatagacttgtttgcagggactcaatgtcgctattgtagtttgaaagcagccatcagggttatgtaaatgagtgagtctgattttgtttcagcaaaattttatttaccaaaacagacaatgagtgggctggatttggcccatgatccttagtttgccaactcctgctttgggctcacccagatctgattttgaattctggctctgctactggttagctgcaggagcttggaaggctctctgagcctgtttcctcatctgtaaaattaaagcaataatttctaacactcaagagtgttacctcacgcctgtaatcccagcactttggaggctgaggcaggcggatcacctgaggtcagaagttcaagaccagcgtggccaacgtggcaaaaccctgtctctactaaaaaatacaaaaagtagccgggcatggtggcgcgcatctgtaatcccagctacttgggaggctgaggcagggatactgctagaacctgggaggtggagcgtgcagtgagtggagatcacacctccacactccagcctggccgacagagcgagactccatctcaaaaaaaaaaaaaaaaagagtgttagaaggttttgagataatgaataaaagatgccttgtgtatactaagtattcaacaactgatagctgcattggtctaattataacagtttagaagcgattgagtcaacaaatgctggatttgtcagggaggacttcctatcaggaggtagatcttgggctgagtcctgaagcaaagataggcattggatagaggagttgagagaacaccctaggactgttattattattattcgacacggagtctcttgctctgtcacccaggctggagtgcagtggcgcgatctcggctcactgcaacctctgcctcccaggttcaagcgattctcctgcctcctaagtagctgagactacaggtgtgtgccaccacacccggctaatttttatatttttagtagagacagagtttcaccatgttggccatgctggtctcgaactcctgacttcaggtgatccacccgcctcagcctcccaaagtgctggaataacagatgtgagccaccgcacccagcccagaaccatttttcaatccttggctctgccttttattagctgcaagatctcaggcaatttatttaacctctccaaagactcattttctcattcacaaaatgaggcaaataataatatctactatcccaggttgtcatgagaattaaatgcaacatgacatttaatgaaatgagaagtcccttggacattaactggctaaagtatgtgctcgacaaggatatcattttaggtggatacttagcatctcagaactgatgctcacaatggaatatcattgaaacgcattaaaattcattttaaatgattgtaggtagtgaggcaattgaaagaagaagacaagaggactgattataatgcttcaggctcactagtctccttttaggagggaaaaacaatttcaagttaaattttaggctctagatttttacccctgctgctcattagaatcacccagattgatgaaatcagagcccatctgaggctgtgtttttcatctccagaatgagagctgttgtggggattaagtttttgaaaaagtacatctaacaggtgatcgaaaatgatagtgatattattgcagtgatggtcattattgttgttattattatactgaaagaggcttcagttttctgatccataaagtgagggaattgcatgagaccattgctaagattccttctagctctgtttttttgtttttgttttttagacagagtctctgtcgcccaggctggagtgcaatggcatgatcttggctcactgcaacctccgcctcccgggttcaaatgatcctcctgtctcagcctccgaagtagctgggactacaggcacacaccaccatgcccagctaacttttatatttttaatagaggtggggtttcaccatattggtcaggctggtctcaaactcctgacctcaggtgatccacccgcctcggcctcccaacatgctgggattacaggcatgagccactgtgcccaaccccttctagctttcttgatcactgattctagggttctctgctgaaatatatttgagacatcctggataaaagatcatgcaagagctcccaatatggtattaataattgattctggaggcttagctactcctgatggattagacatgactcaactgcctctcttatgtgtacaacacaacaacacaaccaagaaaggttattctggcattccatttattcagtttatttacagcccttacttccagcagcacgttaaagatatggccagggccgggtgcagtggctcaagtctgtaatcccaggactttgggaggccaaggtgggcggatcacaaggtcaggagtttgagaatctggcaattcttcagacttagaagcaaccagctcgataacacagtcttgtgtgggctctccctctgtccctccctcgcttccctcatttctcatccctgcccctgagactgtgcaccttcacatagccctgccatgagaccttcatctcaggctttgctttctggggtaactgaggctaaacactgagtggccctaaaagaggattgggatttggaagttagattattcaccagagaacagactttgctgatgatcaggcccaggttgtaattgttgaaaaaaagagaggatgcatagtcttatctcatctcctagtcaaagtcaacaccatgataaataagagtcaaatcctgagatgtgaattggggacatttgagtggttaaccctgagaagcttgcaccttcagacccctcaatacccctgctccccagagaaggctggacattgacctcagcacaggcaggagccctgcaagatgccatttgtcctactaaagatggacccctccactctgtttctaggtaaataaccaaagtcaagtctccacacagcctgagcaagaaagtcagagcctgctacaggagaaaataccacactggccaaaggattcactagccctggccactgtgtgtgggaggaaccagggaatcatgtgtgggagtcaatgttgaagctgttggactgggggtggggtggaatataagcctggccctggggagtttttcccgtttgagggcctttacccacaactcaagatccagtgctatagcaggagatcccagagctagtcctaacagatggtcaggattgaacttggcctagagtaaaatgaggaggatagtgccagaactttctcaacatactattgaggaagaggtcagaaggcttaaggaggtagtgtaactggaaaggggtcctgatccagaccccaggagagggttcttggaccttgcataagaaagagttcgagacgagtccacccagtaaagtgaaagcaattttattaaagaagaaacagaaaaatggctactccatagagcagcgacatgggctgcttaactgagtgttcttatgattatttcttgattctatgctaaacaaagggtggattatttgtgaggtttccaggaaaggggcagggatttcccagaactgatggatccccccacttttagaccatatagagtaacttcctgacgttgccatggcgtttgtaaactgtcatggccctggagggaatgtcttttagcatgttaatgtattataatgtgtataatgagcagtgaggacggccagaggtcgctttcatcaccatcttggttttggtgggttttggccggcttctttatcacatcctgttttatgagcagggtctttatgacctataacttctcctgccgacctcctatctcctcctgtgactaagaatgcagcctagcaggtctcagcctcattttaccatggagtcgctctgattccaatgcctctgacagcaggaatgttggaattgaattactatgcaagacctgagaagccattggaggacacagccttcattaggacactggcatctgtgacaggctgggtggtggtaattgtctgttggccagtgtggactgtgggagatgctactactgtaagatatgacaaggtttctcttcaaacaggctgatccgcttcttattctctaattccaagtaccaccccccgcctttcttctccttttccttctttctgattttactacatgcccaggcatgctacggccccagctcacattcctttccttatttaaaaatggactggggctgggcgcggtggctcatgcctgtaatcccagcactttgggaggccgaggcgggcggatcatgaggtcaggagatcgagaccatcctggctaacacggtgaaaccccgtctctactaaaaatgcaaaaacattagccaggcgtggttgcaggtgcctgcagtcccagcggctcaggaggctgaggcaggagaatggcgtgaacctgggaggtggaggttgcaatgagccgagattgtgccactgcactccagcctgggtgacagagcgagactccgtctcaaaaaaaaaaaaaaaaaaaaaaatagctgggcatggtggcgcgtgcctgtaataccagctactctggaggctgaggcaagagaatcgcttgaacccagtaggcggaagttgcagtgagccgagatcttgacactgcactccagcctggtgacagagtgagactctgtctcaaaaaaaaaaaaaagaaaaaaaaagacagaaagaaagagcacagacagagtcacaggtatttgcagtaggaagctgtcaggttagagtgcacggaaatagaaagtatattttacacttacagcacatcttcgtttgattagccacatttaaaatactgaatagcaacgtgtggctatttagtattcactaaaatcttggacagtgcaagtctaaagaatccttgatccgtccggcatggtggctcacgcctttaatcccagcactttgggaggccaaggtggaaggatcacttaaggtcaggagttcgagaccagcctggccaacatggtgaaacctcgtctctactaataatacaaaaaaaattagccgggcatggtggtgcatgcctgtaatcccaggtacttgggaggctgaggcaggagaatagcttgaatccaggaggcgctgcagtgagccgagatcatgccatgccactactgcactccagcctgggcaacagagtgagactgtctcaaaaaaaaaaaaaaaattgttgggcgtggtggctcacgcctgtaatcccagcactttgggaggctgaggggggtggatcacctgggttctggagttcgagaccagcctggccaacatggtgaaaccccatctctactaaaaatacaaaaattagctgggcgtggtggtgggcacctgaaatctcagctactcaggaggctgaggcaggagaatttcttgaacccaggaggcagaggttgcagtgagccaagatcgcgcctctgcactccatcctgggtggcagagcaagactatgtctcaaaaaaaaaaaaaaaaatacttgattgtctggacattctgcagaacatcatatggagacactatgttgacgacatcatgctgattgtaagcaagaaatggcaagtgttccagaaacacagtcaagacacatacatgccagaaggtgagatataaactctactaagattcagtggcctgccacactggtgacatttttaaacctgctagatgtttgtgtagaaaaggatttaaccttgcccaaagaggggtctggcctttgtccccagctactggacataatctctttaaactcttgaaatatcattcctgatagaagtatttttgttttgactaggggccttgggccagccagatagcaacaatgtgatctgggttgggggctttggatcaggtggcatcagtgtgacctcctgagtggctagagactagaatcaaccacatgggcagacaacccagcttacatgatggaattccaataaagactttggacacaagggcttgggtaagctttcctggttggcaatgctctatactgggaaacccattctgactccatagggagaggacaactggatattctcatttggtacctccctgggctttgccctatgcatttttcccttgtctgattattattattattatgagatggaatctcgctctgtcacccaggctggagtgcagtggaatgatctcaactcactgcaacctctgcctccccggttcaagcgattttcctgtctcggcctcccgagtagctgggactacagatgcataccaccacacccggctaatttttttgtatttttagtagagacggggtttcacgttagccaggatggtctcgatctcctgacctcatgttccgcctgcctcggcctctcaaagtgctaggaatacatgtgtgagccaccgcgcccagcccccttggctgattattaaagtgtatccttgagctgtagtaaattataaccgtgaatataacagcttttagtgagttttgtgagcacttctagcaaattatcaaacctaaggatagccttggggacccctgaacttgcagttggtgtcagaaataagggtgctcatgtgtgtaccatgccctctaattttgtagttaattaactttcacaactttattattaccgcttacactcaatgtttattcacatttatccacataccacttattctagtgccttgcatcaaagactttctatctcatgtactttattctgcttgaagtaaatcctttaggatattcttttttttttttaaactttgcacatacatacttttattttttatttatttttaattttgttatttttgtgggtacgtagtagatatatgtatttatggagtacatgagatgttttgatacaggcatgcaatgtgaaataagcacatcatggagaatggggtatccatcctctcaagcaatttatccttcaagttacaaacaatccaattacactctttaagttattttaaaatgtacatttaattttgtattgactagagtcactctgttgtgctatcaaatataattttttttttttttgagacagagtctcactcagtggcccagactgaaagtgcagtggcacaagctcggctcacttcaatctctgcctccctggttcaagcgaatctcctgcctcagcctcccacatagctgggattacaggcacacaccaccatgcccagctaatttttatatttttttagtagagacgggttttcgccatgttggccaggctggtcttgaactcctggcctcaaatgatctgaccacctcagcctcccaaagtgctaggattacaggcatgagccaccacacctggccaaaatagaatattctttagtgaggtctgctggtgacaatttttttcttttttttgagactgagtctcgctgttgtcagcttgggctggagtgcaatagcacgatctcagctcactgcaacctccacctcccggattccagcaattctcctgcctcagcctcccaagtagctgagagattacaggcacccaccaccacacgcggctaatttttgtatttttagtagaaatgggggttcaccgtgttggccaggctggtctcgaactcctgacctcaggtgatccacccaccttggcctcccaaagtgctgggattacaagcatgagccaccacgcacagccaattttttccgtttttgtctgaaatcttattttgtgtcatctttgaaatatatttttgatggatataaaattgttggttgatagttattatcattattattattattttgagacagggtctcactctgttgcctatgctggggtgtagtaatgtgatctcggttcactgcagacttgacctcctagggctcaggtgatcttcccacctcagcctccctagtagctgggactacagatgcatgccaccatacccaactaatttttctattttttgtagagatgaggctttgccacatttcccaggctggtctctaactcctgagctctagcaatccacccaccttggccttacaaagtgctgggccatgactagccagcagttactttttatagcatattgaatatttaatatgaatcttctggcatccactgtaactgtttaaaaaatcagctgtttacttggcactcttttttttttttttttttttgagacagagtcttgccctgtcgcccaggctggagtgcagtggcgtgatcttggctcactgcaagctctgcctcccgggttcacgccattctcctgcctcagcctccggagtagctgggactaaaggcgcccgccaccacgcccggctgatttttttgtatttttcgtagagttggggtttcaccgtgttagccaggatggtctcgatctcctgacctcgtgatctgtccgcctcggcctcccaaagtgctgggattataggcgtgagccaccgcgcccagcctcttttttttttttttttagacggagtcttactctgtcatctaggctggtgtacagtggcgtgatctcagctcagtgcaacctccacctcctgcctcagcctgccaaatagctgggattacaggtgcgtaccatcacgcccggctaatttttgtattttcagtagagatggggtttcaccatgttagacaggctggtctcgaactcctggcctcaagtgatctgcctgccccagcctcccaaagattacaggcatgagccaccgcacccggccaagtagcactcctttgaaggtaatctgcttcccctacccctagcaatttttaacaatttttcttcatttttatttcctgaagttttgttattaataatctgtgtgcagatttctttgtatttcttttgtttgcagttcatagtgattcttgaattagtgtgttggtttctgttatcaccacaggaaaattgtcagccgttagcttttcaaatatttccttgctaaattctctcttctcccctttcggtacaattgatttgattaaaactaaaaccagggccgggtgcagtgactcatgcctgtaatcccaacactttgagaggctgaggcaggtggatcacctaagctcaggagttcaagaccagcctggccaatatggtgaaaccccgtctctactaaaaatacaaaaattaccaggcatggtggcacacatttgtagtcaggaggctgaggcaggagaattgcttgaatccaggaggtggaggttgcagtgagctgagatcccaccactgcagtctggcctgggcgacagagtgagatgagaatctgtctcgaaaaaaaaagttatgaatgtttgataaactatatttgttagaatgtttgttgtagaatactattcattgatttttaaacaatgttagattaaaccattcactggatttgtgataattaacttactgattttacctcactgatttgttgtaattaatacaactggtataaaaagactgtgacgaggccgggcatggtggctcccgcctataatcccagcactttgggaggctgaggcaggcggatcacctgaggtcaggagttcaagaccagcctgaccaacatggtgaaaccccatctttactaaaaatacaaaattagccggtcgtggtggtgcatgcctgtaatcccagctcttcgggaggctgtggcaggagaatcacttgaacccgggaggtggaggttgcagtgagccgatatcgcgccattgcactccagcctgggcaacaagagcgaaactccgtctaaaaaaaaaaaagaaaaaaaacacataaaacaaaacaacactgtgacggttcccaaaaattaggagcataattaaaggaactcctgataaaaattaattttatcttacatgtaaactaaaatgactttatgaagttaattcagaaatacaatgcagggtattagtttgccacagctgcgtattcagcctaatgtaatattcttgttatttttaaattcttcttttaactttactcatatgtggatcatcaaatttcaaaagattaaatgacaatactcttagcagcaagcttccctaagcatataaacattttaatgggtgatgattcagaaggtacccgaagaatatgtactgccagatatcattcacccccatatacctgcccgacagacatcccattttgggaccctggataaatgtgtgggtggagagaaagataggagaaagtggtataagcaaatggctttggagtctgattgacagcgattgaaatcctgtctctacctcttaacagcctcatgatcctacataagttaccccgatcctcagggccacatctgtaaattgggggttgcgatggcagccatctcacagggtctcttttcggggaagggcaggaattatggattaagtgagctagtaattgtaaagcacttaatacaaggagggcgcataataagtacttcataaataatgacggccattatcatgactgaggtgtatgcagctgtcggggattacggcgacttcagaatttctggtgggcagggctcaaaggcagcaaatcacactggaagtcgaggtgaggcactgcttctgcacagactgcttagctggagagaatgaggaaggcttagaggagatttagaggaacttagagtcctccgcctccaactctgtgggatctgctcccgtgccagagacattcaggggatttctcgcactctcccctcccctacgtccctcccgccccatccaactaaccacacaacacatacaaaatagcccctgcgaggttctgcacgctggaagggaacaggagaagggcgctgcgctttcttgctgatgccctgtacttgggcccctggtagacacagccacttgtcccctcagcctgcagagaaatcccacgtagaccgcgcccgggtccttggcttcagccaatctccctttggtgggggtgggatgcacgatccaaggttttattggctacagacagcggggtgtggtccgccaagaacacagattggctcccgagggcatctcggatccctggtggggcgccgctcagcctcccggtgcaggcccggccgaggccaggaggaagcggccagaccgcgtccattcggcgccagctcactccggacgtccggagcctctgccagcgctgcttccgtccagtgcgcctggacgcgctgtccttaactggagaaaggcttcaccttgaaatccaggcttcatccctagttagcgtgtgaccttgagcagttgactttatttttcagtgcctagttttccagataccaggactgactccaaggactattactcatctggagggtttagcacagtaccgtcgcatagtaaatttccatgtcagttttggttacctttcatgcacttgcaaacatgccatgctctgaaacgaaataggcacatcttttttttttttttttttaaggagtcttcctctcgcccaggctggagtgcagtggcgcgatcttggctcactgcaacctccacctcccgtgttcgagattctcctgcctcagcctcctgattagctgggactacaggcatgccacgacgcccagttaatttttgtatttttagtagagacggggtttcgccatcttggccaggctggtctaactcctgacctcaggtgatctgactgcctcagcctctcaaagtgttgggattacaggcataagccactgcatctggccagaaatgaaataagtaaatcttttaacctgctctaacaatatagtgaaaagaccatattattattagagcaggttaagggatttgcctatttcgggttctagttatagtcttaaacttggacattcttgtagaaagtaaaaagtttcctcttcaaagttccccttcttgttaaagaatacatcataagtgttagaagtaatagtttattttaaagactaactttcttcaagcctccttgctttgtgctaataactctttgttaagccctatcctatgtaactgttggacatgctcacaggcacgttccagttcacagcctatgccccttccttatttggaaatgttattgcttccttaaacctttcggtaagcaacttcctctccttcttcgttcttccttgcacttacctatttagaaagttttaggctattagcaaatcggctatcagtttaagagtgtgaggtcccgctccagccaatggatgcaggacatagcagtgaggacgacccaaatgcgtaagggataaatatgtttgcttttcctttgttcaggtgtgctctcgacatcgttccatctgcgattgagcaccctttctgcagaaagtaaagattgccttgctggagatcttttgtctccgtgctgacttttcttcgtggcaccgattatctatttctaacaattttggtatttctaacattctgaacaatcttgggctagttgtctcttctgggcctgtttccccatccgtcacatgataaacttcattggtttaaaaaccccagcgaacatttattgagttactattaccttcctgccctccccaaccccaaccccagggagcagttacaacctcagccgctgagcgcactcgccgggtgttaagaagcaccaaagacagggaggcttgattgattttgctttgggagtagagggtcagaagattcacaggaaaatggcatttgagcaaggatgattcactggagctagcttttaaatactggcgaggcttttatgttgcagtcccttacaaagttgagcattcgcagggactgcactccgaaataagcccgcttccccttttcattcgctaatgatccagggagctgctggttccgcatgcggcaggttgtgccttttcctaatcagggttctgcatcgcctcgaacccgcaggccgtggcgggttctcctgaggaagcagggactggggtgcagggtgaagctgctcgtgccggccagcgcctgtgagcaaaactcaaacggaggagcaggaggggtcgagctggagcgtggcagggttgaccctgccttttagaagggcacaatttgaagggtacccaggggccggaagccggggacctaaggcccgccccgttccagctgctgggagggctcccgccccagggagttagttttgcagagactgggtctgcagcgctccaccgggggccggcgacagacgccacaaaacagctgcaggaacggtggctcgctccaggcacccagggcccgggaaagaggcgcgggtagcacgcgcgggtcacgtgggcgatgcgggcgtgcgcccctgcacccgcgggagggggatggggaaaaggggcggggccggcgcttgacctcccgtgaagcctagcgcggggaaggaccggaactccgggcgggcggcttgttgataatatggcggctggagctgcctgggcatcccgaggaggcggtggggcccactcccggaagaagggtcccttttcgcgctagtgcagcggcccctctggacccggaagtccgggccggttgctgaatgaggggagccgggccctccccgcgccagtccccccgcaccctccgtcccgacccgggccccgccatgtccttcttccggcggaaaggtagctgagggggcgccggcggggagtcaggccgggcctcaggggcggcggtggggcaggtgggcctgcgagggctttccccaaggcggcagcaaggccttcagcgagcctcgacctcggcgcagatgccccctgagtgccttgctctgctccgggactcttctgggagggagaaggtggccttcttgcgcgaggtcagaggagtattgtcgcgctggttcagaagcgattgctaaagcccatagaagttcctgcctgtttggttaagaacagttcttaggtgggggttagtttttttgtgtttctttgaggaccgtggatcaagatcaaggaaatctctttagaaccttattatggaagtctgaagtttccaaatgttgagggttttatgtctaaaagcaacacgtgaaaaaattgttttcttcacccagtgctgtcttccaatttcctctttggggggaggggtagttactgctgttactaaaataaaattacttattgctaaagttccccaacaggaagaccactacttttgatgactttggcaagtttgctaactactggaaccctaacttacaaacgaactacttacatttttgatttccagttgtattacctgcccaatgtttacgtagaaacagcttaattttgattctgggtaacgttgttgcacttcattaaaaatacatatccgaagtgagcaagtatgggtctgtggacagcagtgatttttcctgtcaattcctgttgcttcagataaaatgtaccagacagaggccgggcgcggtggctcacgcctgtaatcccagcactttgggaggcttggcgggtggatcacctgagatcgggagttcaagaccagcctgaccaacatggagaaaccccgtgtctactaaaaatacaaaattagccagggtggtggcgcatgcctgtaatgccagctacttgggaggctgaagcaggagaatcgcttgaacctgggaggcggaggttgcggtgagccgagatagcaccattgcactccagcctgggcaaaaagagcgaaactccgtctcaaaaaaaaagtaccagacagaaatgggttttgttttctttttttgttttgagacggagtttcgctcttgttgcccaggctcgagtgcaatggcgcgatctcagtctcggctcactgcaacctctgtctcccaggtttaatcgattctcctgcctcagcctcccaagtagctgggattacccatgccccaccatgcccggctaatttttgtatttttagtagaaacggggcttcaccatgttaggctggtcttgaacccctgacctcaagtgggcctcccacctcggcctcccaaagtgccaggattacaggcatgagccaccgcggccagccagaaatgggttttggaaaaagcactaaacaaaatcgaacttggtttcatatgacagctctgctgctaactgtaacaggggcagaccagttaacctacttttctgtcttctgtcagctgagaattagatgattcccaaaggcccattgaactctgaatgactttaaatacttcttcttaagtgggtacacggttttggtaactgatgccaggtgatgaatgcatgaaagtgcttaatgaatgaaaccggtaaaatagtaggaggaagctttattggtaaggcaggggtatacctaatagctctctaatttattggtattgaagtggttaacttttgtttttttaaggggggaaaacattctaagaataatgaggcaaactgcatattgcacaagagactgttgtctctattcaacaaataccttttgagtgtccagagtctgccaggtgctgtgctaggccctcacgattgagtagtgaaccagagaatgtccctgcacccatggagcttattgtctactggggtagacagataataaataagcaaacaaatcttctctcttctccctttcgctccatgtaagtgtgtgtgtataggtgtatacttacaagttgagtaaagtgttatgaaagattaagaggagaaatgcattttggttagatgttagaggactcagcaggtgaccttgaaacttagagctgaaggatcagtaggaggtaactagagaggccagggaatcgcatgttcaaaggccaggaggcaagaaagagcatggtgcccttcaagagaggaaagaaggctactgtgactggagcatagatgtaggcaagtgttgggtgattgagagctctacgggccatggttaggttttattcctaatgccgagatgccaaacatggtggttcatatctgtaatcccagtattttaggaggccgaggcaggaatatagcttgaacccaggagttcaagaccagcctgagcaacatgagacctgtacaaaacatttaaaaaattgctgggtatgatggtgcacacctgtggtcccagctactcaggaggctgaggcagaaggatcacttgagcctaggaggtggaggctacaatgagccatatttgagtcactacactccagcctggatgacaaagtgagaccatgtgtcaaacaaaatacagaaagaatattaatttaaaattttgaaagaggagtgatctgaacttatatcttaaaaagatcattctagggcatggtggctcatgcctgtaatcaagggctttgggaggctgagacaggaggatcacctgaggccagttcgagatcaacctgtacagcatagagagactccatctctacaaaaagaaaaaataaatagctgggtgttgtgagttattcaggaggctgaagcagaaagatcacttgagcccaggagtttgaggctgcagtaagctatgatcccaccactgcaacacagtgagatcttgtctcaaaaaaaaaaaaaaatcattctaggtgctttttggaggctggatgtggtaagagtagaagctggagatggtcctgttagggattcgattcagactttaaataccatcaatgcattgagtcccaaatttacatcactacgttggatccttgcccctgaatccagactggtatatccaactttaggttcagtttgtatctctacctgaccaatatagaggtgtccagtcttttggcttccctaggccacattggaagaagaattgtcttgagccacacatagagtacactaacgctaacaatagcagatgagctaaaaaaaaatcgcaaaacttataatgttttaagaaagtttacgaatttgtgttgggcacattcagagccatcctgggccgcgggatggacaagcttaatccagtagataccttcaacttacaatatctaaaattttatgccagatttagtcattttaaacctgctcatcagtttttctcaagaagtagtattttggctttttttcttttcttttttttgagatggagtttcgctcttatcgttcaagctggagtgcagtggcggatcttggctcactgcaacctccgcctcctgggttcaagtgattctcctgcctcagcctcgcaagtagctggaattacaggcatgcgccaccatgaccagctaatttttggagacagggtttcaccatgttggtcaggctggttttgtactcctgacctcaggtgatctgcctgcctcggcctcccaaaggctgggattacaggcatgagccaccgctcccggctgcatttttggatttttagttgctcagcccaaaactttagtacatctttgaacctcttctttcctcctactctatatctgatccatcagcaaatctgttaggtctacctcacacatatcgaaatcctaccacgtctcaccatctgtgacaattaacaccctggtctaggcagtcatctctgttaagattgagtggttaaggatgtcctctaaggagatgacattcaaatcttagcttaaatgtcaagagggagctggttttataaagattgaggaggcagcattattttgccataggcttccatttggtttccattccattcttgatacttatggtatatattcaaaacaaatgcacagaaacagacccaggtatattgggaatttcggatatagagttcctagttgggaaaagatagactgatctgtaaatgatgctagttatccatcatctggcaaaaaataatttcctgcctcctctcatatatctcagatcaacagactttttctgttaagggccaaatcataaatattttaggctttccagaccatatggtttctgtcacactctcctttatccttgaagccatagacaatatgtaaacaaatgggcatggctgtgctacgataaaactttacttacaaaaactggtagtgggccagtttaggcatggccagcactttgggaggctaaggcagatggatcacttggggtcaggagtttgagaccagcctggccaacatggtgaaaccctgtctctactaaaaatacaaaaaatagctgggcatggtggtgggtgtctataattccagctactctggaggctaagacacaagaatcacttgaacccaggaggcagaggttgcagtgagctgagatagcaccactgcactccagccagggtgacggagtcttaaagcaaaacaaaacaaaaggtagtgggttgtatttggcccatgggctgtagtttgccaatccctgatgcagaaacaaattccaggtaaataagagcctggaatgttaaaaaaacaaaacttgaagtcatgtagaagaacaggtagggggaacaatcctgatctcaggataggaagggatattgcttaaaataagacacaggaaaatataatccatgttgtgtaaatttgactacgttaaaacttaaaactttcgccaagcgcggtggctcacgcctgtaataccagtactttgggaggccgaggtgagcagatcaccaggtcaggagattgagaccatcctggctaacacggtgaaaccccgtctctactaaaaatacaaaacattagccgggcgtggtggcgggcgcctgtagtcccagctacttgggaggctgaggcaggagaatggcctgaacccgggaggcgaagcttgcagtgagctgagatcgcgccactgcactccagcctgggcgacagagtgagattccgtctcaaaaaaacaaaacaaaacaaagcaaaaaacctaaaactttcatacaataaagtatacctaagatacttctagaagagaagatttacatccaggacgtgtatggaatttctgcaagtaataagtaaaagacaagggacatgaagaggcagttcacaaaagaggaagccaaaatgaccaataaacatgaaaggatgtttaacctcaaaggaaacaaggaaatgaattaaaaacatcaaatgccatttcaaaactagtaagttggcaaaattaaaaataccaaggatgagaatatgaagcatggctatatgagtgcatggaatggtacagtcactttcattaaaaatgcacataatttgttttttatttatttttttgagacagtctatgtcgcccaggctagaatgcagtggcatgatctcggctcaccacaatctctgcctcctgggttcaagcaattctcctgcctcagcctcctgagtagctgggattacaggcacatgccacaacgcccggttaagttttgtatttttagtagagacagggttttgccatgttggccaggctggtctcgaactcctgacctcaggtgagctgcttcccaaagtgctgggattagaggcgtgagccaatgctcctggctgaaaaaaatgcacataatttgttacctagcaattccatgtctagaggcttatcctagagaaattcttgcttatatgcataggaagacgtgtactagaatgttcactagttgaatgtttaagtgaaaattaggaaataaagtaaatgttcattaacaggaaaatgagtaaaggtatatttataaaacaattaagtagctaaaatgaataaactagagctgcgtgaatgaactagaactggttcaatagtcatgtcagattattgaatgaatacaggtcagatatgtatagagtgtcatttgtgtaattaattttttttttttttttgagatggagtctcactctgttgcccaggctggagtgcagtggcgtgatctcagctcactgcaacctccacctcctgggttaaagtgattctcctgcctcagcctcccgagtagttgggattacaggcatgcaccaccatgcccagctcattttcctatttttagtggccacagggtttcaccatgttggccaggctggtcttgaactcctgacctcaagtgttccacccaacttggcctcccaaagtgctaggattacaggcgtgagccaccgtgctcagccatttgcgtgatttttaaagatgtgcagaataatgccattaaaaaaaatacacatacatgtatatatatacacgtttggctgggtgtggtggctcacacctgtaatcccagcactttgggaggctgaggcaggaggatcacttgagcccaggtgtacaagactagcctgggcgagatagcaagaccccatctcaacaacagaaaggataattaggtatggtggcatgagaggatcacttgagcccaggagttcgagtgttatcaggccactgcactctagcctggacaacaaagcaagaccgtgtctcaaaaaaataaaaataaaaagtatttgtatgtggtcatagtcaaaaaacgtacatggaaggaaaatgtctttatttatttatttatttttttttttttaagacagagtcttgctctgtcacccaggctggggtacagtggtgtaatctcagctcaccgcaatctcggcctcccgggttcaagcgattcttctgcctcagccttctaagtagctgggactacaggtacccgccaccacaccctgctaattcttgtgttttcagtagagacagggtttcaccatgttggcaaggctggtctcgaactcctgaccttaagtgagccacccgccttggcctcccaaagtcctgggattacaggtgtgagccactgcgcttggccaggaaatatctaatttagtaagtatttatatctgggaaaggaagggtcaggtggtgattcataggaactctaaagtctatgtataatacttagggggacagaaggaaataaagcaaaatgctgatatttgattgttgagttgtgtatatgttagaagtataacataggagatctgattgatagtaggagaatgtttttaggtggtaaaagtggaaccgtggtggtttgttttggcagtagaatcagttggtcatagtttgtatgtggaaggtaataaacagaccatgttaaggatgacttccggaattttggtctgagtagtgggtggatgacagtgtcattcatgagggaagatgaagactgaggtaggaacaggtttgggagaagatgacatgttcccttttagacaagtggaattatggaagatggcaggtaggtggttagctatatgaatttgagataaaagatttaggatggagatataaatttaggagtaacagcgtatctatggtattgtaagccttaagaatgggtaggatcagccaggaaatacagatgtatatgcagaagagaggagtcaaggaagccaagacaagttaatgtttaaagtgagtgatgtagtccatgggcagatgctgctgagagggctgcaaacaccagtgaccctacaacatttttaaatgtcgtcttcctgacagcagtgatcagtacctgcaacgatcttatttatttttttcatgttagtctccacacacttgaatgtagactttttgaaggcaaaatcattgccttttctgagctgggagcatgtctggcacataccaagcactcaacagttgatgtattgacttcatccagatactctgagggcgagttatttcctgctactagcctttcacctttcaatgtttaagagcacaaatacagagatgggcacgttttggcatttcttattttgataaccttttcctggtaagattttttaatgttgaaaaaaaaaaacaagaaaagagggttaaaaatagtcttatgtcagatcctgtgatagaattcacacttggcttaagctgctgggcaccttcctatcttggatgtcatattagcttatctacagcagaatttttactgttttatgtagtaaggaagcaattatatgattattttacagacaaattattctttatcttttatttttttagacggagtctctctttgtctcccaggctggagtacagtgtcgcgatctcggctcactgcaacctccgcctcctgggttcaagcaattctctgcctcagcctcccaagtagctgggcttacaggtgtccgccaccacacccagctcattgttttgtatttttagtagagatggggtttcaccatgttggccaggctggtcttgagctactgacctcaggtgatccacccgccttggcatcccaaagtgctggaattacaggcgtgagccaccgtgcctggcccagacaaattattatactctgagtgttagaggcttaggatgttttcacttgatgctatgggaggaataagtaataagatatgatacacaaccaaagacctttcttcactatgcttctagtagctagtactatggatgacacatggtaataatattggttagcatttgtcctcaatttactgtgctagttactcttctaagccccttacaggtatatattttttttcatcaataatcctctaaggtagtttttattattgacctaattttataaatcaagaaaattaagacccagagaagtaagtaacttgtccaagatcacatggcttataagtggtagagccagaatttgaccccagatgttgtgactacattgtctctccataagcaggttcaactcttttgactggatgctgttccaaggtcacttccttagagaagcctttgctgacaactaccctcctgtgccctcctccaaggctgtccattgttctagaactttgaatactcatcttagaataaagctggtctaatttttacagtgttatagaatggatctctgactgcaaaagttggtcataattatctttttatgttctagtgaaaggcaaagaacaagagaagacctcagatgtgaagtccattaaaggtaagttctgcccttggcagtccactgcattaaaaagtgatgtgctttgcatttgtgagttctttaatcctgttatactctctcttttggcattaatcatttctgccttattttataattacttatgattttgatttatttccctctttaacctgtataatgctttaacatctagcatataataagtaggctttttttttttttttttttttggagacggagtcttgctctgttacccaggctggagtgcagtggcgcgatcttggctcactgcaagctctgtctcccgggttcacaccattctcctgcctcagcctccccagcagctgggactacaggtgcacggcgccacgcctggctaattttttgtattttttagtagagacagagtttcaccatgttagccagtatggtctcgatctcctgaccttgtgatccgcccgcctcggcctcccaaagtgctgggattacaagcgtgagccaccgcacccggccgtaagtaggctttttttaccttaattttatttttttgagatggagtcttgctcttatccccaggctggagtgcagtggtgccatctcggctcactgcagcatccacctcccgggttcaagcgattctcctgcctcagcctcccgagtagctgggattacaggtggccgccaccatgcccagctaatttttgtatttttagtagagacagggtttcaccgtgttggccaggccagtctcaaactcctgacctcaagtgatccactcgccttggcctcccaaagtcctgggattacaggcgtgagccaccatgcctggccataagtaggcttttactgagccttgtgtgtattggctatcctagtgattacagtgaaccagtgcccttcttattaatcacacatttaattgttccctaaaagtgattagttcactttatttatttagtaagacaaaaaatgaagaatactcttaactgagcagtctgttaactgtaggaaagcactgacacttataaggcttagttttctgtcatttatccagaagtatggttgattacagtttttacttttttatttgaatgaacaaccttaatttaaaatatattttgtttattttttgttgggatcgatacattgtccttgtttatagattagagcatgctttttaaagatgctgtattactcactgattttatttgtccagtgtacagagattgaagtgggaaaattataatggaaattgtttccatagtcattacatattaatttcatcaatttatttccataaaatctgtagattgctacttatttagatttttccttcaaatgtttttatgttgtattgcttgcactgagtatttattctatatgctcaatttgctggagaagaagactaattataacttaggcaagttgtaaaattagggaaaaaagtaaggtaccttacagcctagtttacttatttcttatgtaaagccagttagattccacattagttcaaactgccttctttgagcaaaacttgattggcagtgataaaggcttaaagcccttctcaagcagagacctgtaaagactagatctgactgtagtagaaggaaggaacttagatgtttcaggcagtgagaacaccagtcttccactctaaactttgccactaacagtatgaccttgggaagttgtaactttcttcagattcttcatttgttgaatggggggattggcctagctaatttctaaatctctactgggctaaaaaattctgtgcttatactctgattatgaagtacataatctgtgcttaacattcactgacttatccttaggataatacagaagcagtacaagaaacagcccctcaagatgtttgcagtctggttagaaagacaaacttatacacagaacagtagcaaatagaccaaaataataatagctgccatttatagaacacttcttctgttctgggcattagacaaaaactgactataacggtgaacaaaaaagacttaggtcctgccctcattgaacttacagattagtaggggagaggaacattaatcaagtaattccacagatggcttagcctagattggtagtgatggaagtaaagagatgtgaacggacttgaaaaaaaattcggaggcaaaatggatagaagtttattattgattaaatatgaggtgtgagagagagggatatttaagattgatacctaccttctggcttgcctaacagaaccaaaacaggaaattatatgttcagttttgttatgttgggtgggaggtgcttttgagtcattcatttatatatgttatatatgttattttatatgcatagtaattttaaggtctgagttttaaaccaaaggttagagagtgattttttagagtctagcaaacctaagttgaaatcctgcctgttgaaatggctgtttactagctcattaacctagggcaaagtattcaacttgttttcatttttgtcttcatctctaaaatgaggaaaatatggtcttacaagattgtcctgagagatagatgaaataatatccaaaaaaaaaaaaggtacatagagaaactcgtatagtgcctggtatatagtaggtcctccattggtagctatcattatctagttttaacatagccttcagtttgttgaattagtcaaactgagtgaagcactgcaaggaattcagaggaatttgagatcaacaaatgatttctgaagtttagggaagacttcatggcaatgacacttaccttgtataaaagttgaagaataagaaagatttgaatgagagattctttctcttctccctaccagcccagcttcttatttgaggatatattgggcaaaggggccttcagacaagtagagggagatttttacagaaagattgagatgaaggtatagaaggctgtaaagaccagaaaagagaattgagacagaggaagcaggaagccactgtaggtttttgagcaagatattgatgctgtaagtatggtgtttatgaaaggttagtctggaagagatttgcaggatggagaccccggaagtttttttgttataatacagaaagacttgcactgagggtgaggtgttaaaaataaacaggtaagtaaatgtttaaacatcttgaaggaaaagtcaacaaatcttggcaagtaaacagataacagtgaaaaagaatgggaccaagattttgagttttggagactggtggattgaacagacagggaaattgagaggagaatcagatgatgatgttttaagttgatatttagacagattgtgcttgagatggtaaagtcaatgtgggtgggaatgcttagtagcgagtaatcagtgatacaagaccaaagcccaggtcaaagacaagtcacagatacagatcagggctttttcatctgctccacagaggtgtaccctaggagctgttgcaaacagtccatgtggagggtgtgagtaagatgtttcccttgaatttgccagaattacttttttgttgttgttgttgttttttctgagacagattctcgctctgttgcccaggctggagggcagtggcgagatcgcgcagctcactgcaacctctgcctctcgggttcgagtgattctcctgcctcagcctcccaagtagctgggattacaggcttgtgccaccaagcccagctaatttcttttgtatttttagtagagatggggtttcaccatgttggccagactggtctcgaactcctggcctcgtgatctgcctgcctcagcctccaaaagttctgggattacaggcgtgaaccactgcacccggtcccttgttaagtttattttggtgggaagcaaaggaggtttcagcttttaaaaagtttgaaaattattgctctggtaataattaaagatttgagagtaaatatgctttctagcagaaagaataaaagaagaacagatagcctcaagaaggggagccaaagaagcaggctatatctgacacactgggtgttgataaatgggtattaaaagaatgagagcaatgagcagatagaagaggaaattaggagagtataataccatggagaccaagaaagatagactatcaggaaggagtggtaaaaataagttactagttctaagagagatgttaagagggaccggggaaagccttgtacaaatgagttagtagcattttacattatatacatctaattaagaaacaatgcgagagtctcaccattcctatagactcttacttgtacttgtctgaacacgaaaactggcttttgtttataaataagctaaaaattattttgctccaatttctcatgaaaataaaaataaaccttcttttaacattgaaaaaatagtttgaagacagtcactcttcattttgtaattcccacaactattattgaatgactgaaattatctttattctgaagccaaaggggtgatactgatatttcttcagactactaaaaatatattttatgaatttttagtgtgctttatctttttttgtttttttttttgagatggagtttcactcccgttgctcaggctggagggcagtggtgcaatctcagctcactgcaaccttcgcctcccagattcaagcaattctcctgcctcggtctcccaagtagctgggattacaggcacctgcccccacacccagctaattttttgtatttttagtagagacagggtttcaccatgttggtcaggctggtcttgaactcctgacctcaggtgatccacccaccttggcctcccaaagtactgcgattgcaggcatgagccaccatgcctggcctgaggaatatttttctaggttccccccaccccaagcatttattctgcaattttagttttgttcctaaagcaagcaaggtttaaggatttaaaaataatccgtattttagaatgctttctggctttgttactttttatccacagtagaagttctcagagaatgatctccctcttttaatttaactttttggcacagtattttgagaattataaataatattagaatgttttctggctgggtgtggtggctcatgcctgtaatcctggctacttgggaggctgaggcaggagaatcacttgaacatgggaggcagaggttgcagtgagccgaggtcatgccactgcactccagcctgggtgacagagcaagactctgtctgggaaaaaaaaaaaaaaaaaaaagagtgttttctttcctattttccaccacttgattaagttacttttcctcttaagtattttttgctgagtatgctgacttaagagtaatgttacaaaatttaatttttaaagttctctgaaagcccctttatgagagttttaggctatcaaattgtgtttaattcttaacaattttttgaaaaattatagcttcaatatccgtacattccccacaaaaaagcactaaaaatcatgccttgctggaggctgcaggaccaagtcatgttgcaatcaatgccatttctgccaacatggactccttttcaagtagcaggacagccacacttaagaagcagccaagccacatggaggccgctcattttggtgacctgggtaagtaactatcattttttattaacttgtattagaaggatttgagtacaatatgtgaaacttctgtcataggatacagaactatataattggaaagtgctttggaaaaaatgtatttaaaataacagctacaagtataatgggtagctgtgttgtgttcctgtaaatatagaatataaagcatgcccagtagaaaaacaagcatttccagaagaaatatatctgatcactaaatataaatatatgaaaaagatgtctcactttattactgagggaagtgcaaattaaaataatcagttaatgttctcctaacacattagcatattttttaaagtttgacaatttgaatgtcagtgaagatgcagggaaatacccctcctatttagtgataatataatctggtgaagactctttggaaagcaatttggaaatcagtataaaatatgcatgtcatttaggccactctttctaagacctagccctcagatatgctcattcatatgtgcaggtgtgtatgtgtgtgtgtgtgtgtgtgtgtgtgtgtatatgtatgtatgtatgtatgtatgtatgtatgttgaaggctattcattatagtattgtttgtgatagcaaaaaattatggacaacatataaatatctgttatagggaaataaccaaattgtggtatacgcatgctctggagtataatatagccatttgtttctatttatttattttcttgagacagggttttactctgttgcccaggctggagtgcagtggtatgatcatggttcactgcagccttcacctcctgggcacaagccattctctcgcctcagcctccagagttactaggactgcaggcatgtgtcaccacacccagataattttttaattttttgtagagacagggtctcactatgttgcctaagctggtctcaaactcctggcctcaagcaattctcccacacaggcctcccaaagtgctgggattaccaacgtgaaccaccacacctggttcagtgtagccatttagaaatctaaaaaagacgtgggaaaatgtctaaggcatgtttaaatgtgagaaaagcaagtcacagtatgcatggtaaaatccgttatattaaaataagttcttccaaaacaaaaacatatgcaggagacctttattttgtcagtatttcttacccaaatttctgcacttagaaaattgcatgtcatgttgtcataagttgaaaaaaagatccatgaaccaatggacttctaataaaatcagtcctgcttttgacatctctctctacttttgtgtatattcaaaccagagtgtcaatgtgtttgtggggcacacttagcaataatacatagcagacaaaatgcatatagctcagagagtaaaattgtaagttttgctagatcactcataaattgctgatgagaatttaaaatggtgcagatgctctggaaaacaggcagtttctttctttctttttttttttctttttgagacagggtctcactctgttgcgcaggctggagtacagtggcgtgattacaactcactgcagcctcaccctcctcaggttcaggtgatcctccctcagtctcctgagtagctgggactataggcatgcaccaccacgcctggctaatttttgtattttttttttttttttttgtagagacggggtttcgccatgtttcccaggctggtctcaaactcctggaatcaagcgatccacttgcgtaggcctcccaaagtgctgggattacgggcgtgagctactgtgcctggcctaggcagtttgtttgtttgtttgtttgtttgtttatttatttgtagacggagtctcacaggctggagtgcagtggcccaatttttggctcactgcaacctccgcctcccaggttcaagctattctcctgcctcagcctcctgagtagctgggatgacaggtgcctgccataatgcctggctgatttttgtatatttagtagatatggggtttcaccatgttggtcaggctggttttgaactcctgacctcaggtgatcagcccgcctcggcctcccaaagtgctgggattacaggcatgagccgtcatccctggctggtggtttcttatgacgtgaaacatgcaattaccatatgacctagcagttgcactctgtatttatcccagataaatgaaaacttaccttccaataaaaacctgtgcacaaatgttcatagcagcttaatattgaaaaactggatgttcttcagcaggtgaatgaactggttcattcataccatggaataccattcagcaataaaaaggaacaaactgttgatacatttaaccacctggatgaatatcaagggaattatgctgtcagacaaaaaccagtccctaaagactacatatagtatgattccgtttggataatattcttgaaatagagaaattaagagaaatgaaaagattagtgtttgccagatgttagagacagggaggtgagaggggtaagtgggtgtagttataaaagtgcaacatgagggatctttgtgatgttgaagttgtatcttggcagtggatgcagaaatctcaatgtgataaaattacaaagaactaaaaacaagaatgagtatagataaaactggggaaatctgaacaagttagagtgttgtatcactgtcagtatcttagagtgatattgtactatagctttgcaagatgttaccatgggagaaactaaagtgtacaagggatctctaggtattattatttttttagagatggggtttcactatgttccccaggccggtcttgaactcctgggctctagtgatccgcctgccccagcctcctaaagtactggaattacaggcgtgagcgaccatgcctggccctttcagtattgtatcttagaacttcatgtgaatctagcattatctcatagaatttaattaaaagaaattgtaaacctcacagaagatcagaatttcctcaagtttgtgatgttgacaaagatgaactagttgacactgacagtaagactgaggatgaagacacgacgtgcttcaaaaaaatgatttgaatatcaatggattaagaagaactcttttgacaaattgatgaaaccctcagtcagttttataagaatgcccatctttatgatcatgctatgaaagccaatttttaaaaaaattttttgtctttcctaacaattagcttgtggttataatttaaatttagttaaatataagataaatgattttttattaagtttagtttcatttttcaaggtacgatctcaaagctactctttaacctactatgaatgaataatgctgagttcataacatctttgtagatatatccacaattttccctcaggataagtgcctacaagtggaattactggactgaaaataatgcagtttgctaagactttgctatctgttcctgaatgctcctccaaaaaggttttgccagtttacatcctcatgaccagcgaatgagagtgttgcctattttcctgtgcccttgttactgcttaataatttttgaaaaaaatctaatttgacagacaaaaatgcattttatgttaatttgcttttctgggatttttaatgaggttgagtatagtttttaatatttttattggcccctttggaactagtatcataagttttttttcttaagaatttatgtagtctgggctgggcgcagtggctcacgcctgcaatcccagcactttgggaggccgaggtgggtggattgccgaaggtcaggagtttgagaccatcctgaccaacatggtgaaaccgaatctctactaaaagtacaaaaactagctcagcgtggtggcgggtgcctgtaatcccagctacttaggaggctgagtcaagagaatcgcttgaacccgggaggtggaggttggttgcattgagccgagatcgcgccattgctctccagcctaggcaacaagagtgaaaagtctcaaaaaaaaaaaaaaaaaaaaaaaaaagaatttacatggtctgaattgccattaaaagagatatgagaattattgagtaacaaataactttttaataatttaggcaagttttggacgattgtactttgtttagaaaccaaaagcatagtatttgtagtttttttatttactttagttgctaggaagtaaactttattcaaggtctctggtaccagttgttgctaaaagtgattgactaatctgtcaatctgaaattatttgttgctgaactgctaattcttttgcttctatcttttaggcagatcttgtctggactaccagactcaagagaccaaatcaagcctttctaagacccttgaacaagtcttgcacgacactattgtcctcccttacttcattcaattcatggaacttcggcgaatggagcatttggtgaaattttggttagaggctgaaagttttcattcaacaacttggtcgcgaataagagcacacagtctaaacacagtgaagcagagctcactggctgagcctgtctctccatctaaaaagcatgaaactacagcgtcttttttaactgattctcttgataagagattggaggattctggctcagcacagttgtttatgactcattcagaaggaattgacctgaataatagaactaacagcactcagaatcacttgctgctttcccaggaatgtgacagtgcccattctctccgtcttgaaatggccagagcaggaactcaccaagtttccatggaaacccaagaatcttcctctacacttacagtagccagtagaaatagtcccgcttctccactaaaagaattgtcaggaaaactaatgaaaagtgagtatgtgattttcttgtgtgtacatatgtgtctcactttctttttttaatttactaagcagaacttcagatgaggaataaaatgattggaatattttttttctcctctaactacttgtaaatttgggagaatttggagagtgtagtagagtcagatcagtgtatggaaaaggagcaggagtgactggaccttctaagaagtgtgttatcagaattagtaaatgaagggtcaaatgtcctacttttcccctccactgattttgacatcaaaccattatccacatagccttatttcctccctcggtcttaattttattaatattttactgcactttgcagataaaatttttaaaaaatttttaaaaattgccaataagtgacatttattaagttcagtgcttagtgtatatttggattttatttattagtcacaagacctttgtgcaggtagtaggcatgattatctttttttttttgagatggagtcttgctctgtcgcccaggctggagtgcaatggcgcggtctcggctcactgcaacctccgggttcatgccattctcctgcctcagcctcccaaatagctgggactacaggcgcctgccaccacacccggctaatttttttgtatttttagtagagacggggtttcaccatgttcgccaggatggtctcgatctcctgactttgtgatccgcctgcctcggcctcccaaagtgctgggattacaggcatgagccaccgcgcccggactgattatcttatttacacatgagaaaaccagggcttagaaaggttaggtaacttcctctaggttgtacagtaaatgtggacctagaagcattttgacaagagcacctgtttttttttcttctctattagtttagaaattatatactcttaattatcacctgggattttgattagacagccttcatgttctttttcatcttaaatgttctttgtgtcttaaagggctaagtgatttcttcagatcttttagttcactcattctcagtgaactaaaatgaggtctaatctgctactgaatcaagttttcagcatgttatttccttcctccctccctccctccttccttccctcaaccaggctcccgaggagctgggattacaggcgcccgccaccactcctggctaatttttatattttagtagagacggggtttcaccatgttggtcaggctgatcttgaactcctgacctcaagtgacccacctgcctcggcctcccaaagtgctgggattacaggcatgaatcaccacacctgacggcatgttattttcatcgcaaagttactgtaagctgggagaagtggcacacacttgtactcccagctactcaggaagcttaaggtgagaagattgcttgagcccaggagttttgagaccaacctgggcaacacagcaagaccccagctcaaacaaagaaaaaaagttattgaattttttatttctatggatcattttttgtagtttcttattcctttcacccttcattcccacttttgatcccatcttttatttatttagttttattaaatgtatatttgtctgataattctgctatctacagttttttgtggacctgactcagcatttctttgtttcttcggattcagactgttggtggcttgtgattttagtgatttttggccgtgaacatgtttcttggacttttgtctgtgggaattctctgtgtactctgtataaattaagttacttcaggtgttttgcattttcttttgccatgcacctggggcctgggtcactacccttctggtaccacttaaaactgaatttttgtcttgggtgctcgtactgatcctgtatgagtacaggtttatacttactgtagaaatatggtgtttgattatggggtattgtcccagatggtgctggagtattaatatgctctctgttaaacttaatgtgttgtccctgtaaaactccaaaattctgaattccagaatactactggccccaaatgtttaagataagggcactgcctgtatttgtttctgcctcccactattttccttagtttaacacaaactcacctttttaaaaaacattttgagagaattcagtattgggaagagtttctaacctgtttctggaaatggaagtccaaagtctgtttctgtaattgttttttttttgagatggagtctcactctgtcacccaggctggagtgcaatgacgtactctcagctcactgcaacctccacctcccgggttcaagcgattctcttgcctcagccccctgagtagctgggattacaggtgcccaccaccatgcctggctgatttttgtatttttagaagagatggggtttcgccatgttggccaggctggtcttgaactcctgactttgtgatctgcccacctcagcctcccaaagtgctaggattatgtttctgtaattgtaatacatttattgtttttagaaactgtctttgctttagtggtaattttcaataaaaatagaaatagcagtggagttattaaaagagcattagttacatttttccctttttcattatcttcaaatattatatatagtaagtttgacctttttaaaatgtatacttgtatcagttttaacacatacatagattcctgtaactgtcaccactataagggtaaagaacagttagttccttcacctttgaagtcaagccccacctctatcccaacacttggcaaccgctgatctttctccgtctcaatagctttgccttttctctttttttttcttatttttttttttgagacagcgtcttgctctgtcgcccgagctggagtgcagtgaggcaatctcggctcactgcaacctccgcctcctgggttcaagcagttctcctgccttagcctccctagtagctgggattataggcacgcaccaccacacccggctgatttttttgtatttttagtagaaatggggtttcaccatgttggccaggctggtctcaaactcttgacctcaagtgatccacctgcctcggcctcccaaagtgctgggattacaggcgtgagccactgtgcccaatcaggactttttttttttaaatttacattcaacttgtcatttttttcttgtatggattgtgccttcagagtcacacctaagagccctttgcctaagcaaaggtcatgaagattttctcatatgtttccttttaaaagtattgtggttggccaggtgccatggcttatgcctgtaatctcagcactttgagaagctgaggtgggcagattacgaggtcaggagatcgagaccatcctggctaatgcggtgaaaccccatctctactaaaaatacaaaaaaaaaaaaaaattagccgggcgtggtggcgggcacctgtagtcccagctacttgagaggttgaggcaggagaatagtgtgaacccgggaggtggagcttgcagtgagccgagatcgcgccactgcactccagcctgggcaacacagtgagactccatctcaaaaaaaaaaaaaaagtattatggttttacactttacgtttagatatatatcttttttgagttaatgtcgtataagtatgagggttacgtcagattttttgttttttgtttatttttacatatggatgtctagttgttctaataccatttgttgaaaagacaacctttactccattgaattgcctttgtacttttgccatatttgtctaggcctgtttttggactcctttttctgtttcatgatgtgtgtgtctattcctttgttaataccacatggtcttaattactgtatagtaagtcttaaaattgggtaatgctggccttataaaacgaattgggaagtttttatttttactcttatttccattttctagaagagattgtgtagaattggtgtcatttcttctttagatatttggttgaattgggaagtgatgccatctgggcctagggttttgttttttgtgtgtgagacagagtctcacttctgtcacccaggttggagtgcagtggtgagatcttggcttactgcaacctctgcctcccaggttcaagttatcctcctgcctcagcctcccaaatagctgggattacaagcgtgtgccaccatgcccgactaatttttgtatttttaatgcagacagggtttcaccatgttagccaagctggtctcgaacttgtgacctcaagtgattagcccaccttggcctcccaaagtgttaggattatagatgtgagccaccgtgcctggcaggggcctagggttttctttttcagagtattttaaactatgaattcagattatttaatagatataggactatttaagttatctgtttcttcttgagtgaatttttactgtagtttatggcctttgagtaattaattgtattgaattgtcaaatttatgagcgtgtaattatttatagcatttcgggtttgtagtggtatccctcttttattcctggtgttggcaattgtgtcttgtttttctttgtcagattgtatagggatttattagtcttttcaaagaactagcttttgttttgatttttctgttgttttgttttcaattttattgattttctgctctttattatttcttttctattatttctgcttgctttgggtttattttactcttttttttttctccaagttgcttaaagtagaaacttagatttctggtttgagacctttcttttctaagataagcatttaatactgtaaatttccttctaaccactgctttagttacacccccacaaattctggtattttgaactgagcacaaatgaaatgttctaatttcccttgaatcttattcttttaccaatgaattatttagaaatatgttatttagtttgcaagcaattggagacttttttcctgttatttttctaccatttatttctcatttcattatattatggtcagagaatatattttgaatgatttcatttattaatttttaaaaataacattaaaaaattttttaaaatgtgaatataccacatacagtataaagattgtacattctgtttttggacagttttctataaatgtcaagttgatttagttggttaatgatggtgttcagtttttctttattcttgctgatactttgtatgcagttatatcactttattactcagaagagtgttgaactttccaactacaatttttttttccaattttactttcagctctatctggttttgcttcatgtattttgaggctctgttgttaggtgtgtacacattcaggatgatatcttctgggtgaattgcctgttttatcattatgtaattccctctttatggtaattttccttgttctaagatcagaaatatctgttgtccaatttatatagacactgcagctttcatttgattagtgcttgcatggcatatctttttccatttttttacttttgatctacctttataattctatttaaagggggcttcttgtaggcagcatatagttgggtagtgttatttatttatttatttatttatttatttatttatttattgagacagagttttgctcttgttgcccaagctggagtgcagtggtgcaatcctggcttaccacaacctccacctcctgggttgcagtgattctcctgcctcagcctcccaagtagctgggattacaggcacgcgcaccatgcctggctgattttttgtatttttagtagaaacggattttcaccatgttagccaggctcgtcttgaactcctgacctcaggtgatccacctgctttggcctcccaaagtgctgggattacaggcgtgagccactgcacccggctgagtcatgttatttttaatcttttctcacaatacagggtttttgttggtaaatttaattattttaatataaattttagtataattatttacattaaatgtaactgttgcactggggtatttataatgtgtaaatataattattggtattaatataattatattactcataataatattaatatctttggatttagattaccagtttagtatatgtttttctgtttctccctctttgatttccccttttttgctttttttttttttttaattcttatttttttttagtatttgttgatcattcttgggtgtttcttggagagggggatttggcagggtcataggacaatagttgagggaaggtcagcagataaacatgtgaacaaggtctctggttttcctagacagaggaccctgcggccttctgcagtgtttgtgtccctgggtacttgagattagggagtggtgatgactcttaacgagcatgctgccttcaagcatctgtttaacaaagcacatcttgcaccacccttaatccatttaaccctgagtggtaatagcacatgtttcagagagcagggggttgggggtaaggttatagattaacagcatcccaaggcagaagaatttttcttagtacagaacaaaatggagtctcccatgtctacttctttctacacagacacagtaacaatctgatctctctttcttttccccacatttcccccttttctattcgacaaaactgccatcgtcatcatggcccgttctcaatgagctgttgggtacacctcccagacggggtggcagctgggcagaggggctcctcacttcccagatggggcagccgggcagaggcgccccccacctcccagacggggcagtggccgggcggaggcgccccccacctccctcccggatggggcggctggccgggcgggggctgaccccccacctccctcccggacggggcggctggccgggcgggggctgaccccccacctccctcccagatggggcggctggccgggcgggggctgccccccacctccctcccggacggggcggctgccgggctgaggggctcctcacttcgcagaccgggcggctgccgggcggaggggctcctcacttctcagacggggcggccgggcagagacgctcctcacctcccagatggggtggcggtcgggcagagacactcctcagttcccagacggggtcgcggccgggcagaggcgctcctcccatcccagacggggcggcggggcagaggtggtccccacatctcagacgatgggctgccgggcagagacactcctcacttcctagacgggatggcagccgggaagaggtgctcctcacttcccagacggggcggccggtcagaggggctcctcacatcccagacgatgggcggctaggcagagacgctcctcacttcccggacggggtggcggccgggcagaggctgcaatctcggcactttgggaggccaaggcaggcggctgggaagtggaggttgtagggagctgagatcacgccactgcactccagcctgggcaacattgagcattgagtgagcgagactccgtctgcaatcctggcacctcgggaggccgaggcaggcagatcactcgcggtcaggagctggagaccagcccggccaacacagcgaaaccccgtctccaccaaaaaatgcaaaaaccagtcaggtgtggcggcgtgcgcctgcaatcccaggcactctgcaggctgaggcaggagaatcaggcagggaggttgcagtgagccgagatggcggcagtacagtccagcctcggctttcacaactttggtggcatcagagggagaccggggagagggagagggagacgagggagagccccttttttgctttcttttggattatttgaatttttccttaaatttatttatcttacttatttatttatttttttgagtgattctcctgccacagctcccaagtagctgggactgcaggcatgtgccactacacccagctaatttttttgtatttttagtagagacagggtttcaccatattggccaggctggtcttgaactcttgacctcaagtgatccacctgcctcggcctcccaaagtgctgggattacaggcgtgagccaccatgccctgcctttttctagaatttatatattgagttcttgattgtatctttttatgtaggctttttagtggcttctctaggaattacaatatacatacttttcacagtgtactcacatttaatattttgtaacttcaagtggaatgtagaaaacttaaccaccataaaaatagaactagggatgaggttaaaaaagagagagaaaagaaatgtaataaagatttaataacaccgtttttttttttttttctcttttttttttgagacagagtctctctttctgttaccaggctggagtgcagtggcgtgatcttggctcactgcaacctccgcctcctgggttcaagtgtttctcctgcctcagcctactgagtagctgggattacaggtgcgcgccaccatgcccagctaatttttgtatttttagtagagacggtttcactgtgttggccaggatggtctcgatttcttgaccttgtgattcgctctcctcagcctcccaaagtgctgggattacaggcgtgagccaccgcgcccggctaagtctttaaatatttttttgacattgcactttttctcttttccttctaggattttagtaacccaaatgttagttttgttattgtttggcaggttcctgaggctttccttacttctttaaatttttttttcctgttgttcagcttcgaaaatttctattcatctgtcttcaaattcactggttctttcccgttatttccattctgttattgagtctttgtagtgaattttaaattttgtttattatgttttttagttctaaaattttctttttttgtgtatgtcttatactttgctcctgaaactcttatttgtttcaggagtgatcttatttcttagagcatggttttagtagctacttaaaatttgttttatcatcccagcatatgtgtcctcttgattgtcttttctcttgtgagataatgggattttctggttctttatatgacaattaattttggattgtatcttggacagtttgacttacgttacatgattctgaatcttgtttaaatcctgtggaaaatattgaagtttttgctttaacaagcagttgacctagttaggttcagtccacaaattctaagcagcattctgtcggctctggttccatcatcagttcagttttgtatcttatctgcttatgtgcctttctgtgtccagtctgggacctggccaatggtcaggtcccaaagcctttgtacacttttagaagcagggccatgcacacccagctcacgagtggccccgggagtgcacatacaactcgacgttttcatgggctccttcttttctgtgatgtccctgacacgttctgccttctaagaacctccctttatccctttcctgttgtctggctagaaagtcagggctttagattccctatacttcagcacacttcctgtagctatgtcaacctctgtggccacgacttcttcttcttgggactgcagtttctcttgtcagaaagtaggattcttggagctgctgtcattgctgctgtggctgctctgatgctgcctgggagtcgaaggagagaaaggaacaaaacaaaacaacccaggggatttcctccactctctttgatccgtgagagccccctttcctgttcctcagaccagaaatagagggcctgtcttggaacttcttctttgtgcatctggtgtgcagtttcagcttttgagtccaggccaggaggtgctggacaaacttgtcaggagtacggaggtactgcaagttctgattacttttctcagtccacctgcttccaagtccttggatgcatttgtccattgttttgagttgcattccatgggagagacagaagagtgtgcttatttcatcttgacatacttattaggatttcatatcaaatcaacggatgatattctctatattaatttgctgttttccctttagcaagcacattaggaaaataacactttaacacccgcctttggtggtttctgtcataattattaatacttgactttttttttttttttgagacggagtctcactctgtcctttgaggcattgtccccataaacttttggtaaagcatcaataattttatctttcatccacacaagcttcaccataaatttgatgtttattcttccattttagcagaattcatgttgctccaataggggctgtcttcaaactgatgttttctccttcttagtgcctcagagtagatcctgttcagatacgttataacaggttaatatgagtttattttggtgtaaaagtactttgaaattcatgcatagttttttcatcatatgcattttccatagctttgaacacccccatgtaactctcctcttccacaaaccaaacaatgaaaaagcacctttgtgatggaagtttattttgcaataggaactcacagtgatctaagccctgctattcatgaatataattcattactggagtccaagttgctttttggtttttgaagttctcttcttcccttgcaggtatagaacaagatgcagtgaatacttttaccaaatatatatctccagatgctgctaaaccaataccaattacagaagcaatgagaaatgacatcataggtaagcagtgcttgaaactatggcaaaaaaaaaatgacaaaaaatgcacagaactgacaattttcgttattgactaagataattttttcttaacatggaatttagcagttcccttcctaatttgttttctgagtattttttatatcggattatagctcactttaaaagtttctcggctgcattcggtgcgagggtctttgcctgggccagatgggctgcagtgtagcgggtgctcaggcctgcccgctgctgagcagccgggccggcgggcggctacgctaaccggcacagaccaccggatggactggccggcagccccgcaccagtgcacgaagtgggcgggacagaaacttctggggttggaagtccagtgaggctaaaagccggtaccaaagtctctaggcatcagggctgcagcccaagagtctcacgaccagtgggcaactggatggccagacaggtgtctcagtggtggcctctccgtctcagggcttcatcccacttctcagtgggcctgacgtccctgggcaccctggatgtctacctgcattagccagagccatcacatggcctgtgacttgcctttttttgccagttgattgtgccacacacagtgtcatttctgtgtcatttggcacagctggaggtgcaaggaggagggcagcctcatgtccagtcccagtttcacgtaactttattcttctgaataaagacaatttgctaaccttaaaaaaaaaaaaaaaaaaaaagtttttcttatatgttggacccaaattcttaggctttaacctgaataacaatgacagcaagatcaataaatagtacacatttattaaacactcactgtgtcccagacaatattccaagcactttttatggatagactcattttaacttctaaagaactttgtgggataaatacagttattttatagatgaagaaactgaagcacagagaagttaagtgctttgtccagggtaacagctcagatatggcagagtcaggatttgaaactagaccctcacataccttaactgctgtgctgtggcagtgtttttcatactgtaggttgggaccagccttctcttatgccctcaccccctgccaaaaaaaaaaaaaaaaaaaaaaaatatatatatatatatatatatatatatatatatatataatatatatatatataaaatatatatatatataaaatatatgtattagtatatatgcatatatagtatatattatatattagtatatatactaatatataatatacatattagtgtgtgtatatatatatatactagaataaaaaaatcaaagtatctcagagtagtaaggacaaacatttcagaaaaatgttttcattatatatacatgtatgtatgtgtatgctgattcaacaaatatatttcttataggttatagcaaaatagtttgaaagcttttactgtgttttatcaggaagaccttaggtgaacgtatattcacagataaaagaggttatttattcattcaataaatattacattctcataagtcctaatattatgtatttttattcttcaaaaaagttagtatttgtgatttatgaaataagacatgttcttgcacttttagcagatctgtcccgatgttgggcttctttaatccttagtgtgggtgctttgcactcactcactgctggggacagcaagacccctgttagtctcagctgtgtttcttaaattggcccactgtaccttccagttagctattctggggtccatgtcatgttggctccattttccttttctttctcccacacagatacctataacggctataacataggcctggtggctgttggtggcttatccctatctgcttgtatttaaggggtactgtttcactgagttttgctgacagatgttgtcatgagatttgaggttttctgtgttgttgctctatttttatgtgggaatttgctactatcatcatccctagaccagcttttcctagtaatacaacagggatgttctgactgattagagtttgcctgtttgaagaattggttggctagtgatttttttttgaggggagtctgtaccagttaatagcctgactggcgtgtggataaaaaggaagcagtttcaagtcaaataaaacacttaaaatgaaaccacactgcaactctctttcttttacttaagcttaatcaaattaatgatgatgtaatcccatgaaggaaaagtcttctgaaggatcaagttgataacattttgtgatcaaagaatttgagaaaacctctatcccagtgtctatcattatatattttaggatgttaattacctgtgtggctttaggcaagtcatttttcctccttgagccccattcttaatcctgtccaaattatttgtctcctcttgcagttggactattttaatatagctgtccttcaagtgagttttgttcaaaggagccttcactttagctcttactgtgtacccactttgcatagtcttgttttaaatgtaatccttggatttttggtgttgctaactaattactgtttttatgtgaggatttagagtgatccagaatctatacttgcactacctccttcatcttccacaaatgtttgaagtggtagaatttttaaaaactttgaaggtacagctgacagaatttgctgatggtttggaagtgagtggtatgagagggaaaaaaaggaataaagcatgactgcattttttgtttgtttgtttgtttgtttttgagacggagtctcactctcgccaggctggagtgcagtggcgtgatcttggctcacggcaacctccgcctcctgggttcaagcgattcccctgcctcagcctcccaagtagctgggactacaggcgctcgccaccacgcctggctaatttttttttttgtattttagtagaaacggggtttcaccgtgttggccaggatggtctccatctcctgacctcatgatctactcaccttggcctcccaaagtgctgaggttacaggcatatatataagcatataaagtgtgttatagcatacaaacaggtatatatataaacatgcagtccacacagctgataggaatgaggcagtagtgaaggagaagttgatgtaggagaggggacagttgttacaggaaagaagtctggaggcagaagggatgaattccagtgctcacatagaagattgcttagatgggagcaaggacaatttatctagagtcacaggaaagaatgcagtacacgggtagagatgcaggtgagttgaaagatgtgagagatgatggaaataattttctgattgcttctatattctcaaggaagcaggaagcaaagtcctcagcaaagagaatagaagaggtgttaaatatttgagaaaggagatgtactgtagaaaaaaaaaaaactcagtttctccttctgaactctcacaaaacagaacccttccatgactctagttgtgtggggttttttccctgtcagctaccaattctgcagatgattgttcagtgaacaccaactgggtgtcctctaagtcagttcagttctcacactgtttacctggagatagcatcagatcccacagattgaggactctgtcccacaagactgcctccacttcagatgccagtctcaagtacaagttgtggcctgtgcttctgactgaccttctataaattggagttcccacagtcccctccttgggttcaataaatttgctagagcagctctcagaactcagggaaatgctttacatatatttacccatttattataaaggatattacaaaggatacagattgaacaggcagatggaagagatgcatgggcaaggtatgggagaggggcacagagcttccatgcactctccaggtcatgccaccctccaagaacctctacagatttagctattcagaagcccccctccccattctgtccttttgggttttttgtggagacttcattatataggcatgattgatcattggctattggtgatcagctcaaccttcagccccctcatcccgggaggttggtgggtagggctgaaagtcccaaacgtgtaattctgccttggtctttctggtgattagccctcatcctaaagctctttagaggccacagccacaagtcatctcattagccttcaaaagaatccagagattccatgaattttaggcgctgtatgctaagaaactggctaaaggccagttgcaatgtctcaggcctgtaatcccagcactttgggaggctgaggcaggaggatcgtttcaggccatgagatcaaaaccagcctggtcaacatagtgagacccccttacaaaaaatttaaaaattggccaggcgtaatagctcttgtctgtagtctcagctactcagaaggctgaggatcactgagccctggagttgaaggcagcagtgagccatgatcgtgccactgactccggcttgggtgacaaagtgagaccttgtctcagaagaaaaaggaaaaaaaaaaaactgggcaaagactaaataacatatttcacagtatcacagatttgtattgtctaggaaagtgaatgtaaacagaccaggacactagtatgatcccttggtttcatgaaggtcccactaaagtcatgaacacaaagtgagactaggcatcatgttatatggtttttccagccatgtttaacagctagctaaatagctaattgtttcgctgcagtttattttagcagttccttattttagcacatttcatgttttaaaatttctaccaataacattttaataaacttttttacagataacttcacaaatccataattttttaagttacaatcccagaaatagaattgctcattgaaagggtatgttcatttttaaagttatgctagaaactgccaaattgccttcagaaaaaggtgtttgtatccccactaacactagtgttagttttcttgtgcccttgctcaagtatacatattattaaaaacaatgttgggccagtttactagataaaaggtgtagtgcctccttattctaatctatttgattactagtgagtatgtatgtcttttcacgttggtcattttatgtttgttcctttgtggattgtcatgtcctttgctcatttttcttttggaacatttcttagtagtttataagagctcttggtattttaatgatagtaaccttttaactgtcatgcatgctgcaaatcttttttctgtttgtttgcctttgtattttgtttttggagggtttctatgtataggaattaaattttatgttgttaaatcttttgatttctgcttttgcatatgtacttcaaaagactttctattttaagatcaagtgttacctgtattttcttttagttctatttaaaacctcttaatttatatgcctgtgctgttaactcccaagttgattcacaagtgtgtatacatagtttgaatttagtggcaatttaattatttacaacttcttttgcagcaaggatttgtggagaagatggacaggtggatcccaactgtttcgttttggcacagtccatagtctttagtgcaatggagcaagagtaagttagttcatattttcacattgtgcatcctagggaatttgggttcattgttaggaatgggcttcactcagctaaaaacaaagtatttttgagaatttaaatattttggatatttacaagatcatataaagcatactctatcttggttaacagtttcttttaaatataaattatgtgaactcttaaaattttcattttcattttcaatgttaatatttcctaagttaaaataatttgtttttagttctgaaataatttggggagtgattgagtctgtagtgattatgactattagaattggtttatttatttaaataatgcatgtcttcagatggctctcctaatttgttagttaggctttaagctaaatggatgctatataactaaatccacatagatttgttgaaatggctccagaggttttttagatttattactgctatgtgcccttaaaaaaaatctattcattctttcacttaacatttatcagaagagtgctctgtgtaagacgtggttaggcatagtgccagtcttgaaggaagttacagcctaataaaagacatagggcatgttgtttggttactgtaatatgaagtggcatgtgttaaatgtcaggggagaactacaaagtcataaaaaggtgggagagattacatacaggtaaaggaatcaggaatgacaccatggggagtaaggtagtgttgacctaggcctttaagatacaatagggacagtatggaaagagtatatttttcccacttaaactctttccttggtcgttccctcaaattttcccttttgtccatgtgcaggcactttagtgagtttctgcgaagtcaccatttctgtaaataccagattgaagtgctgaccagtggaactgtttacctggctgacattctcttctgtgagtcagccctcttttatttctctgaggtaaagtctgcatttcttttcacactctattcgagcattccagcctctaactatcaatgctggggccctgtctataggaaataacacagaagagccaagtcatttccaaaaagatgtatcattgtttcaagttgtttctgatggcaagagtaatttaataatatattagagagaacatgaaaattcaatgtattaaataactctaattttgagaaacctaattaaactactgcatgtaagagagtgcatgtttttaattatttggagctattttaaaaccacagaatttgaaacttgcttccagtgcataaattgcagaccagacttcagaagagaaaaaaagtagtaaattttttcttatgctcatcatttttactttagtcacttgataggattgcccagtgaagaagcatttgcaacagacaatgagtatattaatctttttgaggcatacagtttagtataatgctctttgttaggcttcaacaagtgaaattattttgttggaaagcaaatgactattaagtagaaagaggattcccagtctcacaaagcagtaatttagacactcgattctgcctctttacaagaatacaggtactcagttgatttgttttctcactccctttctttgctataagtttaaatcaacaatttgtttaggttaatatgtcctcatggaatggtggaaatgatcagatataaaatatttggtttggttagtttactctttatatgtttgctggcaaggaaccacaaatccagtttagtataatttttactctagttcactaaaagtttgcatccagctgtgtaggtagtgtttgtttcttgttaacttttttttcgtctaaaagaatactttaaaacttttcaatctcaaatgactgtaacttgctgacaggtgttaacagaagaagtagatctttttgttttttgcttatgacctgtattttaatatttgagcttatagattagagattgtgagagaaatctgtttatagtcttattttcccttgtgtattttttcttcctagtacatggaaaaagaggatgcagtgaatatcttacaattctggttggcagcagataacttccagtctcagcttgctgccaaaaagggccaatatgatggacaggaggcacagaatgatgccatgattttatatgacaagtgagttatattgatagatggattcagcagatacttattgaacatttgatatgttttgtggaaataaagatgaataaactcagtctctgttgtcaaggagctcacaggaggcagcataaaagctgcttttatatggtgtttgtaaagctttgggggttcttagaacaaaagtttctgctgggaaaggggaggtgtatgtggggtaaacaggatggcaatggtggtgttcaaggagtgtttcccagaagagagattttgtttggatcccaaagaaagaagggaattttgctacccagagaaggcagaaaacaacattctaggcaaaggcattggcccagaagccatggaaacgtaggggaaagtggcactttcaagaaacttgagtttagataatcaaaggagtggggaataaatatgaggatgctggtactaattggaatagattgtaagggaccttgaatgcctatttatgggtatattatactttctgtataaatctgctcaggcacgttgttaattagttttttattagttttcactgaaaatgagaggatggaaacatcatacagtaaacaaaattgaaaatatctggtcaggcagatgatgagcttgtggccagctctgtaacgtatggtattcttttcatttaacttttcttactctgtaaaaaaagtaattcgtggtcgggcacggtggctcactcctgtaatcacaacactttgagaggcagaggcaggtgaatcgcttgagcccaggaatttgagaccagcctgggcaacatggcaaaacccgcctttactaaaaatacaaaaattagctgagcgtgatggcgtgcgcctgttgtcctagctacttaggggcctgaggcagaaggatcacctgagccttgggaggtcgaggctgcagtgagctgtgatccactgtactccaccctgggcagggcagtagagtgagaccctgtctccaaaaaaaaaaaaaacaacaaaggtaatttgttatttgtatccttaagcaaatgctaaaggggtaacttggggatagagaaaagtccacagatgttagggtttgaagacactaatagtatctaggccagtggttcctgaacattagtctgtgggctcttgctgggctgtctgcataggaatcacctgagagcttattaaaaataggttttcaggctggttgcggtggctcacgcctataatcccagcactttgggaggctgaggcaggcggattacttgaggtcaggcgttcaagaccagcctggccaacatggtaaaaccccgtctctactaaaaatacaagaattagccaggcatgatggcacacacctgtaatcccagctactcaggaggctgaggaaggagaattgctcgagcccgggaggtggaggttgcagtgagcggagatcatgccactgcactccaggctggctgacagagggagactctgtctcagaaaaaaaaaaaaaaataggttttcagtctgggtaccggtggctcacacctgtaatcccagcactttgggaggccaaggcaggcagatcacttgaggtcaggagtttgagaactgcctggccaacatagtgaaaccttgtctctactagaaactacaaaaaattaactgggcattttgacgggtgcctataatcccagctactagggaggctgaggcaggagaattgcttgaacccgggaggcagaggactgcatctcaaaaaaaaaaaaaaaaaaaaggtttccagtccccctgtctcagaaattctgattctgcaggtttgaggtgtgaccaggaatctttatttttagaagacataccagataattctgataaatagccagtttagggatgtagtctaattttcctattttgcaagtaaggaaaataaggcccagagaggtaatgattttctcaaagtcacagaacaagttagtggcagaatttggactggaatgcagttcttaatgttctgtccagtgtttattctggtacagtatgtttgtagaaggtattacgtaagaaacattgttatatagatgttgagataggaagagtttacatttagaaatttggtctaaaatgcctgaacattcaagtcgtggaggagtattgaccaacttactcaatacaacataggagattcacattttgttacaaaaatgctgatttaaaaggagagttttcttttttttcttcttttttattttttgagatggagtcttgctctgtcacccaggctagagtgcagtgacacgatctcagctcactgcaacctccacctcctgggttcaagcggttctcctgcctcagcctcctgagtagctgggattacaggtgggggccaccacgcccagctaatttttgtatttttagtagagacagggtttcaccatgttggccaggccggtcttgaactcctgacctcaagtgatccacccaccactgcctcccaaagtgctgggattataggcgtgagccactgtgcccagcctgcttgtttttgtatcatatatatgcatcatcataatcatgcattatcaacctttgtatttctgtcaggacatagaaaccattagagtgcttggaagagagcctttttttttttctcgcatttaatgctttttttggtattcatttcataatcagcttaccaaaacattacctgcattataccccatcaaggtagaaatctttgtgttatcaatattggttactccctttccacaccgagtcatcagtaagtcctgttctatccaaataggtcatatgcatctagctcacccctcagtgctgttttgttttgaatttgtacatgtttactcctgatgccttgtagttatgatgatgtgttcttattttattctgtgcatacaagttctcagctcgctttttagggaaaatgaccatgtcttcctttcctataaattcctttctatctatcaagtcctcaacagagaataggtacccataaatatgtgattgttagtttctttgcctcagttgtagtctgatccttacagcttttaaacaacagtagagttcaccgtcaagaactaaggatggttggcaggcagatagaaaggtagcaagttgacccaactatctctggggaagtgggaacaaagaaaggttacatcagcactgtcatcacatagctctatagttctaggcctgcaggctcaatcaagtagccttgtataagattctctggaggaggtgctgaaagttgcttatacttgctatggaatttgattttacttcggatatctttttaccataggtacttctccctccaagccacacatcctcttggatttgatgatgttgtacgattagaaattgaatccaatatctgcagggaaggtgggccactccccaactgtttcacaactccattacgtcaggcctggacaaccatggagaaggtaacccagaacttcaaacgtatcaaactacaagaagttttattggtagaactcataaaatataaggtgggaaaaccaagcagaatagcacagtggaaattgaagcagtccagcaaagtgattaagagcagaggccttgagtctggcctggtatgtacagtcacgtgccacataacattttagtcaacagtggactgcgtgtacgatggtcctgtacgattataatggatcaaagctggtagtgcaataataacaaaagttagaaaaaataaattttaataagtaaaaaagaaaaaagaaaaactaaaaagataaaagaataaccaagaacaaaacaaaaaaaattataatggagctgaaaaatctctgttgcctcatatttactgtactatacttttaatcattattttagagtgctccttctacttactaagaaaacagttaactgtaaaacagcttcagacaggtccttcaggaggtttccagaaggaggcattgttatcaaaggagatgacggctccatgcgtgttactgcccctgaagaccttccagtgggacaagatgtggaggtgaaagaaagtgttattgatgatcctgaccctgtgtaggcttaggctaatgtgggtgtttgtcttagtttttaacaaacaaatttaaaaagaaaaaaaaaattaaaaatagaaaaaagcttataaaataaggatataatgaaaatatttttgtacagctgtatatgtttgtgttttaagctgttatgacaacagagtcaaaaagctaaaaaaagtaaaacagttaaaaagttacagtaagctaatttattattaaagaaaaaaattttaaataaatttagtgtagcctaagtgtacagtgtaagtctacagtagtgtacaataatgtgctaggccttcacattcacttaccactcactcgctgactcacccagagcaacttccagtcttgcaagctccattcatggtaagtgccctatacagatgtaccattttttatcttttatactgtatttttactgtgccttttctgtatttgtgtttaaatacacaaattcttaccattgcaatagtggcctacgatattcattatagtaacatgtgatacaggtttgtagcccaaaagcaataggttgtaccatatagccaaggggtgtagtaggccataccatctaggtttgtataagtacactctgtgatgttagcacaatggcaagcagcctaacggaaattctgtttattgattgattgattgattgattgattgagacagagtttcactccattgtccaggctggagtgcagttgcacagtcttggcacactgcaacttctgcctcccaggttcaaccaattatcctgcctcatcctcccaagtagctgggattacaggcaggcaccaccatacctggctaatttttgtattttagtagagacagggtttcaccattttggccaggctgttctcgaactcctgaccttaagtgatctgcctgctttggcctccgaaagtgctgggattacaggcatgagctaccatgcctgggcagtaactgaaattctctaatgccattttccttatctgtaaagtgacgataatatgcacgtttacctcaaagttactttgatgattaaagtaaggtaatgtatataaaatacatattaacatagtacctgacacatggtaagcatcaaaaaatgttaactacttttattactattattattacgtatttttaaataattagagagcagtatcaaaaattagctgggcgtagtggcatgcacctatagttccagctactcaggaggctgaagctggaggattgcatgagcctgggaattaaaggctgcagtgagccgtgttcatgcccctgcactccagccttggtgacagagcaagaccctgtcttgaacaattaaagaaggcattatgccgcaacgttagcttagaaatgatccacatatatcaccagtaactgtcaacaggattggaaccctagttttgggtattatgatcacaaggtattattaatagcttattaataataaagcgttggctaggcacggcgactcacatctgtaatcccagcactttgggaggccgaggtgggtggatcacctgaggtcaggagtttgagaccagcctgaccaacatggagaaaccccatctctactaaaaatacaaaattagccgggcgtggtggtgcatgcctgtaatcccagctacttaggaggctgaggcaggaaaatctcttgaacccgggaggcagaggttgcagtgagctgagatcgcaccattgcactccagcctgggcaacaagagcaaaactccgtctcaaaaatataattataataaataaataaaagtaaagtattgatgtttgtgaatgatttattcttctaatgaactagaggagatttttccaggaatttcagagccagtgaggttatgttgcttgtatgtgtcatgtgtatccaggtgaaaaaacttaattaaacgctattatataataccatacataaaaactgaattttaggaatactgaagaatgacatatagaagtcaaatcattaaatagctagtagtaaacagaatagagtgtcagctgttacccaatgatgataatattttcacgattaaaattaaaccttttctgattttaaaggaaaagttcagatctgtatcatataaagaatgtaaattttcagggtaataaaattaaaatgcagagagaaaaatgcaaaaatagttcttactagatgtgtgtatgtaaggaacttagactaattttaagaacactgtcaagaccctggtagttaggtaggaaaaaagacatgaatgattcattcaacaaaaactttgagtatttctgtgctagatggtagtgttacagtggtaaacaaaataaatgtgtttctgctatcctggagcttagtctacaaaaaaggtacatattggccgggcacggtggctcacgcctgtaatcctagcactttggaagatcgaggcgggtggatcacctgaggtcaggagttcaagaccagcttggccaacatggcgaaaccccgtctctactaaaaatacaaaaattaactgggtgtggtggcggacacctgtaatcccagctactcgggaggctgaggcaggagaatcacttgaacctgggagacagaggttccagtgagtcgagatcatgccactgcattccagcccgggggacaaaagcgaaaatacgtctcaaaaaaacaaaaacaaacaacaaaggcacgtattaaatacgaacataaatatttacaaattatactgaataagttctcatgtttattatttgcttgtccagttacaaacttttccttcgtagaattagaaatataaataataaacatgagaactcattcagtataattaataattattaaatgtaaataaaaacatctatgtacaattaggcatttatttaagaattatttgaaaaaaaaacaatgtggaaacagatattttgatatattgctagtgattgaaattgataatgttcttttgaagagtaaagtgaccatatatattaaagttaaaatttaactcagcaatcacacgcctggtgagttatcttaaggaaatcagtttgaaagtaaaatcaatatatgcacaaagactttaacatttatcataaaccagaaaaatcgagtttcaaattatatcctatggactattttctgctaaaaagtattaatatcaactttatgtaatactttcgtgacaaatattttgggggagaaaacccaacaaaattacatgcattgtaattttttttttttttttttttttagacagtcttgctccagcgtccaggctggagtgcagtggtgcaatctcggctcactgcaacctccatctcccaggttcaagcaattctcctgcctcaggcctcccgagtagctgggattacaggcgctcaccaccatgcctagctaatttttatagtttttagtagagatggggtttcatcatgttggccaggctggtcttgaactcctggtctcaagtgatccgtctgcctcggcctcctagagtgctgagattacaggtgtaagccactgcacccagccttatgcattataattttaatttgtaaactgtacaaagggataatacttgtagtacaacaagaagtaaaaacatttgttataggtagttaacatttgtaaccagtagaattataggtaaaatttatttatttaaaacagttttagttggatttgatttcaactttaaaataatgcttttcatctctatcaggtctttttgcctggctttttgtccagcaatctttattataaatatttgaatgatctcatccattcggttcgaggagatgaatttctgggcgggaacgtgtcgctgactgctcctggctctgttggccctcctgatgagtctcacccagggagttctgacagctctgcgtctcaggtattgactgattgcgtctgccattagggagaaaagcatacacatcctttccttcacatcccagtaacagatcctattatttgtaaattttaagttgtggaaaaaaaagataaaagccaggcacagtggcctgtgcctgtaatcccagcactttgggaggctgcggtgggcggatcacacgaggtcaggaattcgagaccagcctggccgacatggtgaaaccccatctctactaaaaatacaaaaattagccgggcatggtggcaggcacctgtaatcctagctacttgggaggctgaggcaggagaatcgcttgaacccaggaggcagaggttgcaatgaaccaaaatcacgccactgcactccagcctgggtgacaaagtgagactgtgtctcaaaaaaaaaaaaaaaagagagaaataaaattagcctacttactatcttctaatcaaagcatttgtggtaacttaaaatatactgtattgtaaagtatcatgctgtttcatttaggccattattctatttgaatctgtggctgtttctcttaataaatcaagtaatatggaatatattcatagcctctgaagagctctttatgtaagtatttatttaggatactttttgtaaaataagtgaatgaattcttaggtctcctttttttttcttttcttgagacagggtctcctcgctgcaacctggaaattctgggctcaaataatccacccaccacagcctcctgaatagctgggactagaggcatgcaccaccacgcctggctaatttgaaatttttttttggccaggcatgatggttcacgcctgtaatcccagcactttgggagaccgaggcaggcagatcacgaggtcgggagatggagaccagcctggccaacgtggtgaaaccccgtctctactaaaaatacaaaaattagctggttatggtggctcatgcctgtaatcccagctacttgggaggctgaggcaggagaatggcttcaaccagggagtcggaggttgcagtgagccgagatcacgccactgcactcctgcatggtgacagagtgagactccatctcaaaaaaaattttttttttaaatgatggagtcttgctgtgttgctcaggctggtcttgaacccctgacctcaaatgccgcctgcttcagcctaagtttcttttttttttgtaaagagacagggtcttgctatgttggccagggtagtctcaaactcctggcttcaagcagtcctcccaccttggcctctcaaagtgctgggattacaggcgtgaaccactacctataatgttgtgtttcactcaaggccttttgatttcgttttgcattaccgtgccacattgtgcatttccttgaccttttttgggttttttggagtgctttcatatgttaaaccatacctgattctcctcaaaatcacacaaagtagaatatcctaagacaagaaatctaaggaggcataaagaagttaactggttttattaaactcacacagtaaatgatagagccagaaatattccccttctagtgttcttcaccatcagcttaatgtagcataataattttctaattactgttgacaaataaataaccctttgaattttcaatactgggccttggataaattttcctaatttgtaagagagtattatcgtattgccatttacaaagctctcctgagtatctttttcttctgttaagtttacctaggagataaactgctgagtatggttgccattttggttttttgatataggttagaatgtcttggttttttttttttttttttttggtttttgttgttgtcattgtttgagacagcatcttgctctgtcgcccaggctggagtgcaatggcacgatcgtggctcactgcaacctccacctcccgggttcaagcaattctcctgcctcagcttcctgagtagctgggattacaggcatgtgcaaccacacctggctaatttttgtgtttttagtagagaaggggtttcaccatgttggtcaggctggtattgaactgctgacctcatgatccacctgcctcggcctcccaaagtgctgggattgcaggcatgagccactgcacctggctgaatgtcttgtttttgattaggcacttaagaaaggcctaggtactaaccataaaatatatttttataccttttgttgatactatatatatagaaaactgcacttatcataaccttagacaccttgaagaatgttcacaagcagaactaacccatgtgacccagcatccagatcaaaaacagcattatcagcccctctagaagccctcttgggccccttccattcactgtccttcttgtcaccagggtagctactatcctgacttttgatggcatagattagcattacctgttcttgtcattttataaataaaaccatactgtgtattcttttcttgtacagctttattgtgctaattcacatttacatcatacaattcagtggtttttatatggtcacagagttaggtaaccattaccacatcgattttagaacatttttttcactccagatagaaaccccctttacttaaactccaaatcccccactccaccagccctaggcagccactagtctactttttatctctatagagacaatagatttgcttattctggacatttcataaacatggaaccgtatattatgtggtcttttgttgccaactgtctttcacttagcatcatgtgttcaaaagagcatcatgttatccatgtttggcatgtatcagaattttattcctcattatggccaaatatcccattgcaaggatttatgacattttatttgaattgtaccctcctttctgccatttatcaataatgctactgtgaccatttgtgtacaagtttttgtgtggatacaggttttctttttgtttttaaatttgaggtggagtcttgctctgtcgcccaggctggagtgcagtggcacaatctcggctcactgcaacctctgtctcctgggttcaagcagttctcctgcctcagcctcccgagtatctgggactataggcacgcaccaccacgcccagctaattttttagtagagatggggtttcaccatgttggccagtctggtctcgaactcttgacctcaagtgatccacccatctcggcctcccaaagtgctgggattacaggggtgagccactatgcccggctgtggttttcatttcttttgttgtatatacataggagtagaattgctgagtcaagaggtaactcttaaacttattgaaaaactgccagattgttttccgaaaaggctgcaccattttgcaatcccaccagcagtgtatgagttttacagcttctccacatttcattggaacttattatctgtttggctgtttttaaaaatgatagtcattccaataagttctacttcagtgtggtttttgcacttctctgatgagtaatgatgttgagcatcttttcatttgcttattggcctttgttctagctttggaaaaatgtttattcaaatcctttggccatttttatttttatttttatttatttatttttttttgagaccaagtctcactctgtcagccaggctggagtacaatggtgtggtctcagctcactgcaacctccgcctcctgtgttcaagtgattctcctgcctcagcctcccgagtagctgggattacatttcaggcacctgccagcatgccgggctgatttttgtatttttactagtgacagggtttcaccatgttagccaggctggtcacaaactcctgacctcaggtgatctgcctgcctaggcttcccaaagtgctgggattacaggcgtgagccattgggcccagcctagattttcttttttctttttttttttgagaaggagtcttgctcttgttgcccaggctggagtgcaatggcacaatcttggctcactgcaacctctgcctcctgggttcaagcgattttcctgcctcagcctccccagtagctgggattacaggtgcctaccaccacacccagctaacttttgtattttttttagagacagggtttcaccatgttggccaggctggtctcaactcctgacctcaggtgatccacctgccttggcctcccgaagtgctgggattaccggcatgagctaccaggcccagccaattttctcattatattgcccaggctggtctcaaactcctgggttcaagtgatcctcctgccttggcctcccaaagtgtggggagtacaggcgtgagccaccttgctcagcccctttgcccatttttaaattagattgcctttttatattgagtttcaggagtcctttatatattctagataaatgtcccttatcaaattatattatttccaggtattttcttcattctgtgagttgtctttcctctaccttttaaaaaaggtgggtttttgtttgtttgtttgtttgtttttttaagataaggtctcattctgctgcccaggctggagtgcagtggcacaatcacagctcactgccacctcaacttcctgggccgaagtgatcctcttacttcagcctcctgaatagctagggccatagatacacactatcacacccagctttttttttctgtttgtagagacagatcttactgtgttgcccaagttggtctcaaactctaggctcaaagtgattctcccacctctgcctcccagagtgctgggattacaggtgtgagccacacgcaacctgtcttttcactattaatagtgtcttcctgcttcagcctcccgagtagctgggattacaggcacccaccaccatgcctggctaatttttttgcatttttagtagagacagtgtttcaccatgttcacccggctggtcttgaactcctgacctcaggtgattcacctgccatggcctcccaaagtgctgggattacaggcgtgagccactgcacccggccaaaatattgccttcttaacagtattgtcttctaatttgtgaacatggatgtatcttcatgtatttatgtgttctttcatttcagcagaattttgtagttttcagagtagaagcctttcacctccttgggtcatttattcctatgttttaagttcttttcgattccattataaatagaattgttttcttaatttcattttcagattgtttgatgagagagcatagaaatacaagtgatttttacatgttgatcttgcaacttcaactttgataaatctgattgttagctctaatagttttcttgtggattctttaggattttcaatatataagatcatgtcatttatggatagagatagttttttttctggctagaacttacagagcaatgatgagtagaagtggcagaagcaaaaatctttgtcttgtttcctatctgacagggaaagctttcagtttcatcatttaatatgatgttaggtgtgggttttcaataaatgccttttttcagattcaggaatttccctatcattcctgattttttaaggcttttttttttttttaaatcatgaaagggtgttgaatattgtcatgttctttctgtatcagtataaatgatcctatggattttgggttttattctgttgatgtgaaatattaattgattttcagatgttaaaccaaccttgcatacctgagatgaatctcacttggtcatggtgtataatcttttcaatatgctgctggattccatttactggtattttgttgaagattttgtatctgaacgcttaagataacatttacactctatcagaaatgaattgaccataaatgtgagagtgtatttgtgggttcttgattctcttccattccaaagatagacatacatccgtctgtatgtctgtctttatgccagtaccatactctcttgattactattgctttgtaataagttttgaaatcagaaagtataaatgagattttggtatctgagtaacagtcctcatagaattagttgggaaatattccctctttattctggtccctctttcttttttgtttaactgtgtatcttggagattgttccttctcaacacatgagagccgctttccctaccctcccacccctgctatagagaggtctataagtgtctgttcaattattttatttacttaacctattacttagtcggggacattaagcttgtttatgtcttttattttaaacaatgctgcagtgaataatcttgtatataagtcattttccatcaatataagtctctctgtaactgaatttttagaagtggaatttctaggtcaacctatggctctgtatttcacaaaaataccaattctggtttttcttgtggaggtggggagtaggaggtagaatgctggaggagaacttgctgtactcagctggctagtcattttagaaaggtttccttagcttctttttgtcatatggcctcaccaagaatcaaaaacattcctatttaccctgtaaacatggggctttactacccaagatacatatttctggatgtatgacagcttttcatattgaagaaataatgctgtgagtacagcacatttgttggaacttaggtcgttaagaatgtcttataaattcatacattatacattttattttattttattttttagtttttgatacagagtcttcctctgtcgcccaggccagcgtgcagtggtacaatcttggctcactgcgacctccatctcctgggctcaagtgattctcatgtctcagcctccagagtagctatggttacaggcatgcaccaccatgcccggctaatttttttatttttagtagaaactgggtttcaccatattgaccatgctggcctcgaactcttggcctcaagtgatcggcctgcctcagcctcccaaagtgctgggatccttgtattgggtaaaagatgaatattgagggctgcatggtggctcatacctgtaatcccagcactttctgagactgaggtgggaggagtcctggagcccaggagggtgaggctgcagtgagttgtgatcgcgccattgcacttcaacctaggaattataggcttcagtcactgtgcccggcatgtacattttaatattgtgctttcctcttttagctatagtatgaggttacatttcagagtcattgttgttaagcatcttaatagtgatgaggttgagtgaaagttacttctatttcaaacactgaagaaaattttgtacaaatctgtcacattccaagcccaggactgattgtttcatatacttctaattttacaatttctattgtagtccagtgtgaaaaaagccagtattaaaatactgaaaaattttgatgaagcgataattgtggatgcggcaagtctggatccagaatctttatatcaacggacatatgccgggtaagcttagctcatgcctagaatttttacaagtgtaaataactttgcatcttttaaattttttaattaaattttacatttttttctaatctattattatatgcccagaactttcacttagagtgtgcagtataatgtggtggttaagtataaaggctctggagtgacttcctgggttttaatcttggctctgccatttattggcagccgctaacctcttggtatctcagtttcttcatctgtaaaatgagaataataaagtgaaaagatgccaacatcatttactctgggctgcataactgatacttggaaaaagtattcctttgagtttaagaattaagttggttattcattttagcttgtaataaaaagatagtgattcataggatatgccacttactgaaatttaccacagatccaatcataaaatcactttctcttccctaaagatagcttgattaacatgtaaaggtgtgtaaaggcttgattacactaccctgatccgtaccccagttcccagcagcaccatgaaaaagggatttcaacatatttaattactttcagtagaaagtaacagtggtaggccaggcgcagtggctcacacctgtaatcccagcactttgggaggccgaggtgggcggatcacgaggtcaggagattgagaccatcctggctaacacgatgaaaccccgtctctactaaaaatacaaaaaattagccgggcatggtggcaggcacctgtagtcccagctacttgggaggctgagacaggagaatggcgtgagcccgggaggcggagcttgcagtgagcttagattgtgccactgcactccagcctgcgcagtggagcgagactcttgtctcaaaaaaaaagaaagtaacagtggtattgggagactgaggagcctagaaagtacttgaaggaagtaaaaggtttgtttgaccacattgtatttggaaagccagctttttcagctgtgtcagctttgtgtagtgatttttagttcttcttttagaaaataacggacaaggccgggcacggtggctcacgcctgtaatcccaccactttgggaggccgagacgggcggattacctgatctcaggagttcgagaccagcctgggcaacatggtgaaaccccgtctctactaaaatacaaaaagttagccgggcgtggtggcgtgtgcctgtagtcccagctactccggaggctgaggcaggagaattgcttgaacccgggaggcggaggttgcagtgagccaagatcacaccattgcactgcagcctgcgcgacagagtaagactctgtctcaaaaaataataataaaataaaaaagaatggacagtaaacctaaatgagttcattcccaaagatgatgttattcttaagggatggttcatttatttaagaccttacataaagtctatcaattgcgtgatttttcacttctgtaattgtgtgtatgtataatgtaaatatatatgtttttgttttgttttggttttttgagacggagtctcgctctgttgctcaggctggaatgcagtggtgcaatctcagctctctgcaacctctgtctcccaggttcaagcgtttcttctgcctcatcctcccaagtagctgggactacaggcacgtgccaccacgcccggctaattttttgtatttttagtagagatggggtttcaccgtgttagccaggatggtctcaatctcctgacctcgtgatccacccgccttggcttcccaaagtgttgctattacaggcatgagccaccacacccagcatgtattttttaaatgtataaaatgaagcagaaaagagaaatgataatttttcttcatcttgaaagattatcttcaccaggcgcagtggctcacacttgtaatcccagcactttgggaggcctcggcaggcggctcacttgagttcgaaaccagcctggccgacatggtgaaactccgtctctactaaaaataaataaataaagatggttttaatatatgttttagttttatgattttagcatctttctgaaatttttctcaaggcaagtaaatttgtatcagttggtatattggtacccatctatgaaataacttattaggaagatatctctaaaataagatcactttgcctaaaataaactgatatattgatgttcacagaatttttcttttaaccgacttgataaatgcattattcttgacgtcaagtgatccaccttcctcagcctcccaaagtgctgggattacacacatgagccaccgcacctggcattattcttataaaaggttaaatttctagttaagtttaatgtcctctttgttcatgtaccattgcttattttcttcccttcctactcacagtaatcattcttatggtatgcacttttgtttgcttatttttatgtaattgatattacgctccattctgtacgttgtactttcattcacagtgagttttggacattcctatgttcatctatacagacttacttcattttaactacactgtagtattccgtatgtaatatttactataactcatcactgtagcagagcatctcatagtgtatgtattactgttttgccattttggtatcaatgagtatttaagtcatttgcagtttttccctcttatacccagtattacagaggatctctttttatatgcttctttgtaccaagaggcagattaaaaaatttttttttgaaaaaatttttgaaaaaaaatgaaatgaagtctcactatgttgcccaggctggtctcaaactcctaggctcaagcaatccttccatcttggcctcccaaagtgctggggttacaggcatgagccaccatgcctggcctacattttaaattttgatagctcttacaatttactttgtaaagtatctgcatcattttatgttctcaccagtctttaataagaatacttcatacttttggctggacacagtggctcacgcctgtaatcccagcactttgggaggccgaggcgggcagatcaagagatcgagaccaccctggccaatatggtgaaaccctgtctctactaaaaatacaaaaattagctgggcgtggtggcgcacccgtagtcccagctactcgagaggctgagacaggagaatcacttgaacccgggaggtggaggttgcagtgaacttagatcacaccactgcactccagcctagcaacagagtgagactctgtctcaaaaaaaaaaaagaatacttcagacttaattttttttccagtcttaagtgtttgctaatgagattgagtttcttttggtatgtctcttgattgttcaggttttttcttttatgaattgactgttcatctctttttcacattatttctgttgggtgattttattagtgacttgttaaaattctgtatattttttcagcatgacacttcattattcaaaaaaaaaaaaagattctctatgtttctcgatactaatcattggttggtaataccttaaaaataagacccttactgtattttttgcttttttttttttttttttttttttttttttgagatagagtcttgctctgttgcccaggctggagtgcaatggtatgatctcggctctcagctcactgcaactgcaacctctacctccctgtttcaagcaattctcctgccttagcctcccaagtagctgggattacaggcatccaccaccacacccagctaatttttgtatttttagtagagacagggtttcaccatgttggccaggctggtctcaaactactggcctcaagtgatccgcctgcctcggcatcccaaagtactgggattacaggcatgagccacagtgcctagccactttttgctttttaactttgttttatagtactatagttttagtataaacagatgtatgtatacacacaactatggctttataatatgtttcagtcattgttagagcaaggcctaccttttgggtgcttcttttacaaaattgtcttggctattcttgtgccttttttcttatttgtgaattttagaattgtgaattacctgttgactcaccatgttttgtaaactgaggattttgaatggaattgcactcaattaaagattatcttgctttctgtgcagcaatgttttatttcaaataatccctactttaaattacttaggatagctataaattgtgtttctggctttctagatttagatgaaacgctttaaattgattgttttctcctaaatttaaaactgattgttagaagttaaagtcttctgttcattcttatttaggaagatgacatttggaagagtcagtgacttggggcaattcatccgagaatctgagcctgaacctgatgtaaggaaatcaaaaggtttgtggtgtttttatacttcatattaagcctttactcacattagtgattgactgtaagtcaaagaccacttaaggtttaaactgtttattttgtaaagtaaccactgtatctttcaccttgtgtttatagtcagaagtaagtacaagggcttcctgtagtcacatctttatgcaatctcctctgaatcaaaagttagtgaacttgctttgccactccagaaggcacatgaatatgaaaaagcattgtctattttcttatttaatggcaaaatacccgacctaagttggacttaatgtttgagaccgtttattttattaaattatattttttctcttttcttttttttttttgagacagttcttgctctgtcacccagaccggagtgcagtggtctgaccgcacctcactgcaacctctgcttcctaggttcaagcgattttcctgcctcatcctcctgagtagctgggactacaagtgcgcaccaccacacctggctaatttttgtatttttagcagagatgaggtttcaccacgttggctaggctggtctcatactcctgacctcaagcaatccatccgccttggcttcccaaagtgctgggattacaagtgtgagccaccatgcctggccttattaaattatttttattaaatttcctcaagattgatgaaagtaatgaaatataaaagtaatgaaatatatgtggaaaatagactggattaagaaaatgtggcacatatacaccatggatactatgcagccataaaaaaggatgagttcatgtcctttgtagggacatggatgaagctggaaaccatcattctgagcaaactgtctcaaggatagaaaaccaaacaccgcatgctctcactcataggtgggaattgaacaatgagaacacttggacacagggtggggaacatcacacgctggggcctgtcgtggggtggggggctgggggaggaatagcattaggagatatacctaatataaatgacgagttaatgggtgcagcacaccaacatggtacatgtatacatatgtaacaaagctgcacgttgtgcacatgtaccctagaacttaaagtataataaatttaaaaaaaataaatatatgtggaaaatattaataggtcaaaattcaaattgttcatttaatcagaagagtagtttagtcaaatccaagggttagacaacagaaatcttttttgtcaagtgcattctttgtgactgatttcattttcttcctggtttacacaggaagatttcagaaacaaatgtggatccgtgacagatggtatctagaagtttttagtttggttgaattgacagtattttattgagtaaaagatactaatttttgtaagaagaaaaattcaattttgataagtatgtttaagattaagagctattggccaggcgctgtggctcatgcctgtaatcctagcactttgggaagctggagcaggtgggtcacgaggtcaagagattgagaccatcctggccaacatggtgaaaccctgtctctactaaattagccaggcgtggtggcacatgcctgtgcacccgcctccgggtttaagcgatcctactgcctcaggctcctgagtagctgggattacaggcgccatggctaatttttgcatttttagtagagacagggtttcactacattggccaggctggtctggtctcaaactcctgacctcaggtgatctgcccgccttagcctcccaaagtgctgggattacaggcatgattcaccatgtctggccatttatcttattttcttttttttttttttttttgtttgagacggagtcttgctgtgtcgcccagagctggagtgcaatggtgcgatctcagctcactgcaacctctgcctcctgggttcaagcaattctcctgcctcagtcttccaagtagctgggattacaggcgcgtgccaccacatctagctaatttttgtatttttagtagagacagggtttcaccatgttggccaggctggtctcggaactcctgacctcgtaatctgcccacctcggcctcccaaagtgctgagattacaagtgtgagccactgtgcccagccatcttattttctttctttttttttgtcgggtgggagggggacagagtctagctctgtcgccaggcttggctcactgcaacctctgccccccaggttctagcaattattctgcctcagcctcccaagtagctgggattataggcacctgccaccacgcctggctaattttttgttatttttagtagagatggggttttgctatgttgaccatgctggcctcaagtgatccgcccaccttggcctcccaaagtactgggcttacaggcgtgagcttgtattgggtaaaagaacaatattgggggctgcatggtggttcatacctgtaatctgagcactttgtgagactgagatggaaggagtgttggagcccaggagggtgaggctgcggctgcagtgaattgtgatcacgccattgcacttccacctaggtaatggagcaagaccatgtctctaaaaaacaaaacacaatttttttaaggaatactgggaagaggtcagtggtggttttagaacagaggaagtgccagatgacctttgtgaggcattggccaggaagaactctacagtgtctttaggtagcttctgtccataaggataatggggtctcctccccagtattaatagaaaatctctgagctgtttttttttgtttgtttgttttgtttttttttcctgagatggagtctctctctgtcggccaggctggagtgctgtggcgcgatcttggctcactgcaagctctgcctcccaggttcacaccattctcctgcctcagcctcccaagtagctgggactacaggtgtccaccaccacgcccagctaattttttgttatttttagtagagatggggtttcaccatgtcagccaggatggtctcgatctcctgacctcgtgatccgctcgcctctgccttgcaaagtgctggagttacaggcgtgagccaccgtgcctggcctggtttttttgttgttgttatttatttatttatttatttattttttgagacagactctcgctctgtcgcccgggctggagtgtagtggcacgatgtcggctcactgcaagctctgcctgccaggttcaagccattctcctgcctcagcctcctgagtagcagggaccacaggcgctcgccaccacgcccggctaattttttgtatttttagaagagacggggtttcaccgcattagccaggatggtctcgatctcctgatgtcgtgatccgcccacctcggcctcccaaagtgctgggattacaggtgtgagccaccgtgcctggcctgatttttttttttttttaatctggtctcatacctctgacagctcatgaagaagtgctcctgcttcatatgtatatgtgttagcatagtgttaacatagcataggtgttcggtgtttgcagtttctgtttgttttatatgaattaaggtgtattatgagcagttgaagatatataggaaattttttcccaaaccactatctctgctcgttctattcattcagtctgtttatgttattccttcattcattcattttatagaacagtggagtgcctactgtatgcatctattgttctgggtcctggggaagaaaacaaagttcctgctttcatggaacttacattatattggcggagacagtaacagacaaacaaatgtagcctgtgtacatgtgttacatgaaaagcagggtagggggctgggagagagtagtagggagtgctattttcgaggtggttgtcaggaaaggcctcactgaggaggtggcattttgagtagacctgagcgcagcgggggcgtaagcccaggcagcatgtggaggaagagtgttcttggtgaaaggaacaaggatagaggcccgaagctagagagctcagcatgatcaaggaacagcaagccccgtgtggctggaatggagtgagcaaaggaatgagcagtagaaggtgagtgagttgggaggtcaccagagaccatggcaaggacttgaaagtgtcagggacacattggaagttggagcagggaaatgatgggatttatgttttgtttttgttttatgtttagtgtttttaagggattgctctatcagctatttggaaaatttagtgtagggcttcaagaagagaagcagagaaacaacattcttgccatagtcatagtctaagtaagggatgatggtggtgtggattaggctggtagtggaagaccagtccagttcgggttgtatttgaaggtagaggcaaaaagattatatttctaccagcaagcccatctatgaagttacttgtattattaatttaattgagacatgcccacataaactaataaataggaatttctgcagtttggttaaacacccctgtatatcctggttcttcttttagttgtccagatgtctctttaagtcaagtattttttggtggtgtaggagcctagagattgaatttattcacccaaaaggcatttgagtgattactatgtgccaggcactatgctgaatgccaaggatgtaaataagagggcgtagtctcagtctgttttactccagcttggttcctttttaatgaccctgacttgttaagcatatcagttatcctacagaatgtttaatcttctgtactttcctggttgtgttatttagcttatttctctttccttgacatttcttgtaaactggaagttacacctatagtcttgatgattcgtgttacacattttagattagaacacatcatgtgttgtatatggtgtttttgaaagcctctctgtatattggtctgtacattaaaatgttgcctgaatggatacacataaaatttaacagtgattacattagagatgagaagaaagaggtgccttttacttttcaatataccttttcctctgctttttgaactttcttgccctatgcatacgttattgcttaatcatccacctcatctcttcccctgtggctttctgttgcatttggaatgaaatctagcctctttgctgttacctgtggatgtcccttgctggcctctatcaccttactttgaaccactcctttcatggactgagctctcattggactatcttttattcttttgctgaagtttcttcactttgagtgcctctgcagttgctatttcatggctgtggcaagccctgccatggctttcatgcaaggatggttcctccttctcatctcaatattatctcttcagagagggaccttcccaactccgatgatctaaaatcctttgtatataccactcactaccacttctttcttttcttttccttttatcttttttttttttttttttttttgagatagggtcttgctctgttgcccaggctggaatcacgactcactgcagcctcatcttcttgggctcaaatgatcctctcacctcagcctctcgagtagctggaactgcaggcacacaccaccatacttggcttattattttactttttgtagagacagggtttcaccaaggctggtctcaagctcctgccgcaagcaatccacatctctcagcctcccaaagtattgggattataggagtgagccactactcctggcctattttcttattcactgtctaaaattatcttgttcatttatttacatacttgtttatagcttatttctcagctggacatggtgcctcacacctgtaatctcaatactttgggaggctgggttggagaattggttgagcccaggacttcaagaccagcctgggcaacaaagtgagaccctgtctataaaaaattgtttaaaaattagctgggcatggtggcacatgcctgtggtcccagctacttgggaggcagaggtgggagaatcgcttgggcccaggaggttgaggcgacggtgagccatgattgtgccactgcactctagcctagtgacagagtgagaccatgtgtctaaaaagtaaataaaaatagtttctctttcatgactagaatattacctctatgtgggcagggagtttgtctatactatttggcactatatttcctgattctgaaattatgcctagcacatggtaagtactccttaaatatttattgactgaattatttaatacttaagaatttcatttgggattatctgagtggtaagattacggattatatttatgtaagaaaaaatcattttttaaacttggttgccctttgccacactgacatagacactaagttttcttagccagattacttccgaggatactcacagaggccattctcttctcaatccccaaataattgatatttcttagcactttcaagctaatgcaattcttagatgatgtatctgtgtatatcatatcctcattctacaaatgtagaaattgaagtctgggcacagtggctctcacctgtaatctcagcagtttgggaggccaaggcgagcggatcactgaggacaagagttaagaccagcctggccaacatggtaaagccttgcctctattaaaaatacaacaattagggccgggcgtggtggctcacgcctataatcccagcacgttgggaggccaaggcaggcagatcacgaggtcaggagttcgagaccatcctggctaacacagtgaaaccccatctctactaaaaatacaaaaaattagccaggcatggtggcacgcgcttgtagtcccagctatcgggaggctgaggcaggtgaatcccttgaacccgggaggcggaggttgcaatgagctgagattgcaccgctgaactccagcctggtcaacagagggagactctgtctcaaaaaaaaaaaaaaaaaacaattagccaggcgtggtggcgggtacgagtacctgtaatcccagctactagggaggctgagggaggagaatcacttaaacccaggaggtggagtttgcagcgggctgataatgcaccactacattccagcctgggcaacagagtgagactctgtcttaaaaaaaaaaaaaagaaagaaagaaattgaggaatgtggagattgtggtctgtgatttgttaggaatcacacagcaggttagtagcaactacagggctttggttcagaataccaccttgacaatggtttgtttacagttcggctccccttcctctgcctttctctccttccttattgagggcagctggaaagaattttcatcatttactagcctatagctttaatttgagttttgaaaccttgataatagagcacagaggaaaagactgagttttctttttttgagacagtcttgctctatggcccaggctggagtgcagtgacaccatctcagctggttgcaacctctgcctcccaggttcaagcaattctgcctcagcctctcgagtagctgagattacaggcacgtgtcaccacgcccagctaattttctgtttttgtttcgttttgtttttttctgagatggagtcttgctctgtcacccaggctggagtgcagtggtgcgatgttggctcactcaaacctctgtctcctgggttcaagcaattcttctgcctcagcctccccagtagctgggactacaggtacgtgccaccatccctagttcatttttgtatgtttagtagagatggggtttcactatgttgaccaggctggtctcgaactcctgatctcaggtgatctactcgtctcagtttcccaaagtgctgggattattggcacacgcctatttttgtatttttagtagagacggggtttcaccatgttggttagactggtctcaaacttctgacctcaagtgatttgcccgccccagcctcccaaagtgctgggattacaggcgtgagccaccgtgcccagccaagattgagttttgaaaagagccttctgagattatgagaagggcaagcaagataacttaagaagttacattaaaatcatctaagagacagtgtaacaagaaggaattgtaaaatgatgttatgagcacgtgcccaatgtagtggcaatcccttgtgcttcgatacattggtgggagacaaaactgtacttaaattgataaatcccttacatgtcattttaaggagcttagactgactcccatcatgtagacatcagagatttcttttttttttttttttttttttttttttttttttgtgacagagttttgctcttgttgccgaggctggagtgcaatggcgtgatctcggctcaccacaacctccacctcccaggttcaagcaattctcctgcctcagcctcccgagtagctgggattacagccatgcaccaccacgcctggctaattttgtatttttagtagagacggggtttctccatgttgtggctggtctcgaactcctgacctcaggtgatcctcccgcctcagccacccaaagttctgaaattacaggcgtgagccaccgcgcccagcccagagatttctaaacagagttctaaccagatgcttttccctgtcagtagaatgagaatgaattggaggtgggagagactggcatgagggacaccagtcagccagtggaattagctggtaatgttgataggagaagaaaaagattcaaagttaggtagtggtagcaagaattagagggaaggtcggatttatgatatgtccaaggttgaattctaaggtgaaatttggtggcagatttcatgtgtaaattgggaaggtagattgagtttttttaacatgggttttctaacatgtcaatagagtgactctgcaggggggcctgacgagagaacagtgcatggggtgattcaacagccagttgagccttcatgcagagcatttaacactgtgactctgtagactctggttggcagtaaaatttcattaaaccaatatttaaacccttaggtaataataaaaattgagggaaaaggatccaggttttgtattttttatgaattcagttattgaattaaacaggaccttgcctcaagaaataatctaccaacaattaacttgttttaaagcaaagttaggaagtgagcatgttcaaattattaaataaaaaagtaagctgtgtatttcattcatagaaatagaggctggcctacttcggatgattctcagcatgtgattacagatgtgggcttatacatcctagggagttaaggcgtactctggcttggatagagtagagctctttgaaactcttctctcacccagctagtttatatagactagagaactagaatgtagcagcatactctgtcttagaagcccttttatataggagctggtctggaaggtttgaaaacataacaaatgtgttggtgtctcccaatgtattgctagattcttacccaagagcattatcctggttagggtttggtttggttttgttttgttttttaatgtttgccacaaactaacactagatgttagttctttcatcaagtgaggagagtagaagaaaagtccagaactctgaaacaccttttcaaaagtttttcaagccatgatgtttgcaagttaaatgctctgttatgtaagcaatataatcagtttttattaatgtaacattccttagtgttttggggtatcacacaaaaaagaatatccatatctggaagcaacagcttttaaataagagcattgtggtggtggtggtgatagtggtttttttttttttttttgagttggagtctcgctctgttgcccaggttggagtgcagtggcacgatctcagctcgcttcaacctctgctcccaggttcaagcaattcttctgcctcagcctcctgagtagctgggattataggcacctgctaccatgcctggctgatttttattattttagtagagacaggtttcaccatgttggccaggctggtcttgaactcttaacctcaggtgaatcacccacctcggcctcccaaagtgctggaattacaggcatgaaccaccatggccagccaaataagagcatttttaatgtaaaattatgcatgaaatgtacattcaattttgtctttgtttactaggatccatgttctcacaagctatgaagaaatgggtgcaaggaaatactgatgaggtaaatcctacctttaggataaaaagatttctgtttataagtgccaccctcatgtaagtgaggtttaaaattttccttttctttaggtcccatgtttaagcagcatggcacatttatgttctcttacccagaatgtaccaagaaagggtggtcccttcttaacatctaacaattgcctggtagtagcagtgaaggtatcttcagtcagaggctaggaccactgaaggatatacatgcattcaagtttccatcagccagcaggcatcagtaatcagtgtgtagatcaaaagctcaaatgtttccttccccactggcagttttacttcaagtagtggaggcttgcttttttaatagttaattaagtacattgagagatgggaggtgaaaaaaggaaaatgttttattttgaccatctaatatgaaagtagttcggtgttaggtatccagtagttgacactggaagacagggaatgacatgttaatattcatagccagagggtggcccaggttttttcgtacatgggaatgaaattcttatccaaataagtagaaattatgtgcgtaagccatttgttaagagcactgagtatgtgcatctcgatccatctaatgaataaccattatcaccagtttaaattattttctttaggcccaggaagagctagcttggaagattgctaaaatgatagtcagtgacattatgcagcaggctcagtatgatcaaccgttagagaaatctacaaaggtaaggatgacttcgttttgtgtaaactaaaaagtattattttccaggtgtaaaaataaaaaagaacataaggggtttctttgcctttgaaggattaactgctgtggggattaccttcttatcataagcaactagaaaattgacaaactaaatgaaacaactgtttgcatatattggacaatgggcaatacagggaaaccatggaaaccaaacagagcccagtagtcttgctgaacgaaagagttaaatatcaaagttcaggccaggtgcagtggctcacgcctgtaatcccagcactttgggaggccaaggcgggtgaatcacttgaggtcaggagttcaagaccagcctggccaacatggtgaaaccctgtcttagccgggtgtggtggcaggcacctgtaatcccaactatttgggaggctgaggcaggagaatcgcttgaaccagggaggcggaggttgcagtgagccgagatcacaccactgcactccagcctgggcgacgagcgaaaccccatttcaaaaaaaaaatcaaagttcagagagctcaatttgagtagaagttgtaggataaggtagcagaaaagaggaagctgcccagaaagaaagccgtagagatatttagagagattcccatggatccttggcctaggagtgatctgtatatgtgtggggtgaaaacgcatgtgtccaggtagagaaccccccagaaattagtaggctgaatgattgctggaacatagggctaagaaaagttcatggccagaaggatctggccagagtagagagacttagtaatacacaaggcattgggtagtgtcttcacagaggttatgccttactactgaagataaattagtcctagagtacaagcacctgaaccaagtttcaaagcaaatttttaaagggtcaaattacctaacaactgcatgccaaaacaaaggcctaaccctctttacagtaacacaacaaaattcagcacttcacagtgtaaagttagaatgtctgacgtccaggctgggcgcagtggctcatgcctgtaatcccagcactttgggaggccgaggcaggtagatgacctgaggtcaggagttcaagaccagcctggctaacatggtgcaaccccgtctctattaaaaatacaaaaacttagccaggcatggtggccggcacctgtgatcccggctacttgggaggctgaggcaggagaattgcctgaacccaggaggtgaaggttgcagtgagccgagatcgcaccactgcactctggtctgggcaaaaagagcaaaactcaggctcaaaaaaaaaaaagaatgtctgacgtcaatcacaaattaccaagcatgacatgaagttgacctataaccaggagaaaactcaatctatagaaacagacccagatgtgagaaagatgatgaatttagcagacaaagaccatcaagtggctattttaaatattaaaaatatgttcaagtggccaggtgcagtggctcatgcctgtaatcccagcactttgggaggccaaggtgggtaggagttcaagaccagcttggccaatatggtgaaaccccttctctactaaaaatacaaaaaaattagctgggcatggtggcaggtgcctatagtcccagctatatgggaggctgaggcacaagaatcacttgaacccgggaggtggaggttgaggttgcagtaagccgagattgtgccacttgtactccagcctggacaacagagtgagactctgtctcaaaaaaaaaaaaaaaaaagttaaagaaaacaagagtataatgagaaaaatgcaaaatagttttaaaagaaccaaatggaatttcttaaaataaaaaataccagaaatgggggccgggcgtggtagctcacgtctataatcccagcactttgtgggggctgaggcaggcagatcacctgagatcggtagttcaaggccagcctgaccaacatggagaaacctcatctctactaaaaatacaaaattagctgggcgtggtggcgcattgcctgtaatcccagctacttgggaggctgaggcaggagaattgcttgaacccgggaggcagaggttgcggtgagctgagattgcaccagtgcactccagcttgggccacaagagtgaaactccgtctcaaaaaaaaaacaaaaaaaaacagtagactcgaagaactagctgagtttttctttactttaggcagtaagtgtgaccttttgcaggtgactactttagttcctcatgtcctcattagtagatcagagaaattcgacaccaaaaccccaaaagaaaaaccccttctaatcctcattccatgattttatgaatgcatgaagtcctaggcctgcgaaggaatactcattctctttatcctgtgttgatacctctctgcttcaacctccaactcgacatttgcctataggatgtacttggacattcagcataaactacctcacaccattactgaattgcttcatgtgcacatgtcccatgccacaataccggggaccttgtcttccgtgatatttgtccgcagtgctgtgactacaggagggagtcagtgaatgtctgcatgtgtgtctttaccatccctcttgaatatgctctagggttaattcctagaagtagaattactctattgaaaattggcaatatttttcattctaatatctattgccaacatgggaaagcaagtctggatgccagtccttgttatatgccccttgggtaagttacgtaacctctttaagcttctgttcactcatattttaacaaggaaaattacaatattttacctcacaaaattgtagtcagcttctggctgtcttaaactctggtatatagtaaacactaagtgttggtgtccatccttaatttgtaataataggtcacttgttagagaaatgcaccttaccattttcttttcttttcttttttcagttatgactcaaaacttgagataaaggaaatctgcttgtgaaaaataagagaacttttttcccttggttggattcttcaacacagccaatgaaaacagcactatatttctgatctgtcactgttgtttccaggagagaatgggagacaatcctagacttccaccataatgcagttacctgtaggcataattgatgcacatgatgttcacacagtgagagtcttaaagatacaaaatggtattgtttacattactagaaaattattagttttccaatggcaataacccatttatgagagtgttttagcctactggaatagacagggaccacatcctctgggaagcagataagcatagaactgatacttgatgcacactcgtagtggtaactcatccctaatcagcattgtaaagcaggtgccagaggtggtttgctttgtccttccaaagcaggtgagtcagccccaccgagagccaggcagctttgagtggcagcgtggtgctagcagcttcagcggaacagggtgagagttaattatgcagtcttcttgacagcggcattaatttggaaggaaactgacaagtcatgggtcaagtttcagtgacttcctccttcctctgatggcagtatatagttttcacattttaattcctcctcctgagatgcactatacttaaaaccattctctcccctgctaacagaagggtgtgaatctggtttactttgagcattaggatttgcccctttggaattctgcactccagttacttaactttcccttcagaatacatgtggaaagaaagaaagaaatagcgatgactccacttttgcccctgtggcaccttgaacaaagcagttcttcccaaattatactttttttttttttaaataaggtgagcaggatgactggggagagagaaacatttgactttgactgcctcccccattctttgctgtgagctggaaagtgtgcagttggtcgtctttcttctcctttctttaggatagtaagagactcactcactgcacttctgctcagttggcttctgcatcgggatcacacagccatcagcaggactgcccagttggtgagcacactccattgaccacgtggcgccagcgcttcctcaatgcacatgattgagaggaaagaaagttctcttagatgttactgcttttgctcagactttgcaaaaaaaaaaatatatatatatatgtataaatatataattattaatcacttttgtccttgagaaagtcttgaatgaacagagaatttattccattgcaatatttgattgtatagaggcacactgtttcatcgacagaagaagcaaaaaggctttgtgtaagtttttggtactatgtaccacctctgttattcttttaaagctgaagtattcatgtacttaaaccatattatatttaattgtgtttgattttaaaatatatatatatgaattctatttaaaattgtgtcaactttctgctttcagggcatttatggctcttctgttgaaatatattgatctttccaaatattttcatttgctttctaaaaacccagaacatgagccactactggactttgccttgtgtttgaagtgtatggcataaacccaaggtttttattagtcatctatgctgtgattaattcattttgttcttttaacaaaatatttccatccacttcacattgcttcaatctttaacagaaaagcaatataaaggttatagaataaaatgtggttttgggcaactcttgctgcctctgcatgttttggaataacaatttctacaagactctaggctgtttaaactagtgctttcagttaagataaattctaatcatttctttgtatatacattttgtgcttctgagctagagatgccaagtagttgtaaactgcttataaagagaatagcagcaaatttgagactcggctacttttttctgccccacctgctttgagacacagaagcggagtgtggcccgaaattattagccagatttaatatttgatctaaagtaggtccttgtactcattttaaagttggaatttgattcctccaacattgagcacccaccatgttccaggctctgtgcattgtgcccacaaaataagattccctggtggagtttttatgggttcaaataatcagttgaacacccttcatctttatcatgttgttgacattgacacaaattgtttaaaaagaaaagatattagagagaaagtggtacctttgtaacttgatgtgtcttcatcattcggtaagatttgatgaaagtaaaaagcaaatgtcagccaaatccagtgaacagcaataaaacagggagtaactttttataactttttctacttggatttcaacattcagtagagcttttcgaaatgtaagtagtttacagtactggaggtttgactagttcagtaggaatttggaggggaaggtcattctgaattgtaacaaagtacaaacttctttgctgttttatttaagtactgagagctaagcacctgatgaagtgactgacctctctccagtgacagtgtttgggtacctgcctgacttcaggagtggggtttatgtttctacacagtgaccttttctctcgccctctcctccctcttgcccacacaccagttgattggacctgggttgaactcctgatccagacaggcccaagacagttcttaatgttaagaattttggggccgggcacggtggctcatgcctgtaattgcaacactttgggaggccgagacaggcggatcacttgaggtcaggggttcgaggccagcctggccaacatggtgaaaccctgtctttactaaaaatacaaaaattagctgggcatggtggcgcacgcctgtaatcccagctacgtgggtggctgagacaggggaatcgcttgaacctggaggcggaggttgtgcaatgagccgagaccgtgtcactgcattccagcctgggtgacagagggagactctgtctccaaaaataaaaataagaaaaagaattttgggctaggtgcagtggctcacgcctgtaattacagcattttggaaggcccaagatgggcagatcacttgaggacaggagttcgagaccagcctggacaacatggtgaaactccatctctactaaaaagacaaaagttagccagatgtggtgatgggcacctataatcctagctcctcgggaggctggggcaggagaatcacttgaacccaggaagcagagattgcagtgagccaagatcacatctctgcactccagcctgggcaacagagcaagactctgtctcaaaaaaaaaagaatttggccaggcgcagtggttcacgcctgtaatcccagcactttgggaggccaaggcaggcagatcacgaggtcaggagatcgagattgtcctggctaacatggtgaaaccctgtctctactaaaaatacaaaacattagccgggtgtggtggtgggcacctgtagtcccagctactagggaggctgaggcagaggaaggatgtgaacccaggaggcggagcttgcagtaagccaagatcgtgccactgcactacagtctgggcgacagagtgagactccgtctcaaaaaaaaaaagaattttggccgggtgcggtggcacatgcctgtagtcccagcactttgggagaccaaagtgggcggattacctgaggtcaggagttcaagaccagtccggccaatatggcgaaaccctgtctcttactaaaaaaaatacaaaaattagccaggtgtggtggcgggcacctggggaggctgaggcagggagaaatgcttgaaccggggaggcagaggttgcagtaagccaagatcgtgccactgcactccagagcaagactctttctcaaaaaaaaaaaaaaaagaattttgcatggggaaggagagatactgttcaccatctggaatggtgcttggatgtggcacttacaaaatcaggagccagcactgcatggacaaacagaagcatgtgggcctgagatagcaggtaccttgataaccctgaagacatccttggtttctgcatctattcctgcatccttgcattggactacattaatctgtcagttatccttataatgatttttgattttttttttttgagatggagtttcgctcttgttgcccaggctggagtgcaatggcacgatctcggctcaccacaacctccacctcccaggttcaagtgattctgctgcctcagcctcctgagtaactgggattacaggcatgcgccaccacacctggctaattttgtatttttagtagagacggggtttctccatgttggtcaggctggtctcgaactcccaacctcaggtgatcaccctgtctcggcctcccaaagtgctgggattacaggcgtaagccatggtacccggtctgttttttgattttttgaaaccagtctgaagtgagtttttttaattacgtgaaaggagtttggctaaaatactgccatactgccctaatgcctaatgattatgtattctcagcatgtctgcaaagtactgctgatttctggagaataatttttctttagtaaacttcacttaagtcgtcatgtgtattctctcaaaatggtatcctaacctaatggagctaaaagacaccccttgtttttataacaagcagttactgaggcccaggaaggggagaagtccctggcttgtgagatgatcaccattagaactcaggcctgggccagtgccttttcatgcttctcagatccttccaaagaataatgaagattataaccgcttttagcaattgtaataaacccagaaatagaaagctttttggttagagtactggtagaagtttggcgggagagataatttttacaaaatttgtaaatacctgccaattctatatactaggcaaggtctctggccttgtaaaacccctcaaggttacaactttggtggcccacactaatagttacccactgaggccctctccgggtgaacattgagcactagaggaagcccctctgcttgggcaggactgggcgtggtgcagagtaggagcggtgatactgtggattctgggcaggtggagatggccagtgatgtccaataaaggacactggagggagcagtgtgagtaaaggccctgagggcattcatgttcagggagggttgctgcccactggcttgcttggcacacaggagagtgggtattcctgccttagtaactttatgtaaacaagtatttcctcagtctgttcctctcaaactgcctgctctggcacattcagaatgtcacagaactcacctggatgcattcagccccttgcctaaaggtgacagtgcatctccttccccaccccacccctcataccactgaagcacctgtcagactggcccagtctgtgggcaaggagcctagagagggcttagtttcagcttgaaaggagctgggatttaccaagaagcaaatgagagacgaggattgcaacaactgtgccatttccccagcttcagctgactcctgtatattgactgtgccttcagactcatccgtaagtgaccccaggctggcctctcccacatcacagtaagaattccacacaccatacaacttggaaagaggctccagctgaaggaagccccacacttctttcaagtttttcttagtcttctcttcttggcaaagagtaccttttgtttcttctaattatgtaactattggtttagtaaatattcacccattcagtcaccctgtaagtggcaggcactgtttacagggacacaggaaggaataaaaacttgcaggcaccttggagcttgcattctattgaagaggtaatggaagttgggatagcagctaaactatgctggtattggccaggcgcagtggctcacacctgtaatcccagcactttggaggccaaggtgggcagatcatgaagtcaggagatcgagaccatcctggctaacatggtgaaaccccgtctctactaaaagtaaaaaaaaaaattagccaggtgtggtggcgggcgcctgtagtcccagctacttgggaggctgaggcaggagaatggtgtgaacccaggaggcgaagattgcagtgagccgagatggcaccactgcactccagcctgggtgacagagcgagactctgtctcagaaaaaaaaaatatgctggtagttttgattcaagatggcctttggagcccatgatttaggtctcgtacccaccaaggtctactggaaaacatcaggctctcctgctatagacccatagggagagctgcagccgagagggggagctgaagagaagtgccccttctgtgtcctgtcagcctcatccttccgcaaggaccagttgctgtgccactccattcacttgctgcaagactggaggtttttcctcaggtgttgagcacctggtttacaagatgtcagcatcttgatgcctgagaccatcaaggcaagtctctgaacagggcttaccttagagtaaggcttagaagaggccgtaaagtcagtctcagctccgtggctctgcagagctttgggacatgtgaattcttaaaaacaagactattgtacagttactatatgcatgcagtataaaattataaccttggaaaatcctagctagctgttgagctaattccataaagtaatcagctcctgagttctgcagtggtaataataatcagcataatgagtaaacactgtgtgtgccaggcagcgtctcatttgatccttgtgataatcttgtaagtactgattttctcccttctttaaacaaagttttttttttttttttagagagggtctcactatgttgcccaggctagtcttgaattc

SEQ ID NO: 18 - DNA, 162025 bp, Homo sapiens
  allele 156,277: Nucleotide sequence of chromosome 17 containing the genomic sequence of the allelic variant AKAP10-1
gaattcctatttcaaaagaaacaaatgggccaagtatggtggctcatacctgtaatcccagcactttgggaggccgaggtgagtgggtcacttgaggtcaggagttccaggccagtctggccaacatggtgaaacactgtctctactaaaaatacaaaaattagccgggcgtggtggcgggcacctgtaatcccagctactcaggaggctgaggcaggagaattgcttgaacctgggagatggaggttgcagtgagccgagatcgcgccactgctctccagcctgggtggcagagtgagactctgtctcaaaaagaaacaaagaaataaatgaaacaattttgttcacatatatttcacaaatttgaaatgttaaaggtattatggtcactgatatcctgtttcattctttatataatcattaagtttgaaatgtatacttgcactactaacacagtagttaatcttagtcctacaagttactgcttttacacaatatattttcgtaatatgtatgcactggtgtttatgtacgtgtttatgtttatatctgttaaaattagcagtttccatctttttctattttgtaccatcacatcagttcagaaggattgacagagcaaaatgatttgatgaagtataaaagtcacatggtgagtggcataaatacaactctgaacaattaggaggctcactattgactggaactaaactgcaagccagaaagacacatatcctatatgtcaagagatgtaccacccaggcagttaaagaagggaagtacacatagaaagcacaatggtgaataattaaaaaattggaatttatcagacactggattcatttgctcctaaagtcagagtcctctattgtttttttgtttttgtgggtttctttttaaatttttttattttttgtagagtcggagtctcactgtgttacccgggctggtctagaactcctggcctcaaacaaacctcctgcctcagcttcccaaagcattgggattacagacatgagccactgagcccagcccagacgctttagcatttatgaagcttctgaaatagttgtagaaaccgcataagctttccatgtcactttcaaagtttgatggtctctttagtaaaccaaccaagttattcctcaagggcaaaataacatttctcagtgcaaaactgatgcacttcattaccaaaaggaaaagaccacaactatagaggcgtcattgaaagctgcactcttcagaggccaaaaaaaaaggtacaaacacatactaatggaacattctttagaagagccccaaagttaatgataaacattttcatcaaagagaaaagagaacaaggtgttagcaaattcctctatcaaataacactaaacatcaaggaacatcaatggcatgccatgtggaagaggaagtgctagctcatgtacaaaccagtagataatttcaacttgctgccgaatgaaacctctttgcaaggtatgaatcagcacttctcatgtttgttttgctttgttttgttttgtttttagagacaggcccttgctctgtcacacaggctggagtgcagtggcacgatcagagctcactgcaacctgaaactcctgggctcaagggatcctcctgccttagcctcccaagtagctgggactacaggcccaccatgcccagctaattttttaaattttctatagagatgggatctcactagcacctttcatgtttgatgttcatatacaacgaccaaggtacaatgtggaaaagggtctcagggatctaaagtgaaggaggaccagaaagaaaaggggttgctacatagagtagaagaagttgcacttcatgccagtctacaacactgctgttttcctcagagcagagttgatgatctaaatcaggggtccccaacccccagttcatagcctgttaggaaccgggccacacagcaggaggtgagcaataggcaagcgagcattaccacctgggcttcacctcccgtcagatcagtgatgtcattagattctcataggaccatgaaccctattgtgaactgagcatgcaagggatgtaggttttccgctctttatgagactctaatgccggaagatctgtcactgtcttccatcaccctgagatgggaacatctagttgcaggaaaacaacctcagggctcccattgattctatattacagtgagttgtatcattatttcattctatattacaatgtaataataatagaaataaaggcacaataggccaggcgtggtggctcacacctgtaatcccagcacttcgggaggccaaggcaggcggatcacgaggtcaggagatcgagaccatcctggctaaaacggtgaaaccccgtctactaaaaattcaaaaaaaaattagccgggtgtggtggtgggcacctgtagtcccagctactcgagaggctgaggcaggagaatggtgtgaacctgggaggcagagcttgaggtaagccgagatcacgccactgcactccagcctgggcgacagagcgatactctgtctcaaaaaaaaaaaaaaaaaaaaaagaaataaagtgaacaataaatgtaatgtggctgaatcattccaaaacaatccccccaccccagttcacggaaaaattctcccacaaaaccagtccctggtgccaaaaaggttggggaccgctaatctaaataatctaatcttcattcaatgctaaaaaatgaataaacttttttttaaatacacggtctcactttgttgcccaggctggagtacggtggcatgatcacagctcactgtagcctcaatcacccaggccccagcgatcctcccacctaaacttcctgagtagctgggactacaggcacgcaccaccatgcccagctaatttttaaattttttatagagatgggggtctcaccatgttgcccagactggtctcaaaccctgggctcaagtgatcctccctcaaactcctggactcaagtgatcctccttccttggcctcccaaagtgctgggattacaagcatgagccactgtacccagctggataaacattttaagtcgcactacagtcatggacaatcaggcttttcaacatgcagtatggacagtgagtcccagggtctgcttttccatactgaaatacatgtgatactaaggagaaaggtgctcgcaaggatatttaaaatgaagaatatttaaaatgaggaaaaaactgtttcttcatgactttgataaggctgataaagaccatttctgtgatctcaggtgattcactcaagtagtatatttcagtaatcattatctggaacagcctgaatcttaaccaaaataccatgattttttaatgctgttatgataccttgatgatatgaccaaactgcaatgtaggcagctaaatctccacgagtttgacttccccgagagttgacagttttcttcacaaattaaagaaatatattttttgatacatgattggcatatttaaaaactacactgaaatgctgcaaaatgatataaagaaacattttccagaatcaaatgcaatcaaagagtggattaggaatctactcaccattatcaactaaatagaaacacttggactgggtgtggtggctcacatctgtaatctcagcactttgggaggccaaggcaggtggattgcttgaggccaggagctcaagaccagcctgagcaacatagcaaaactctgtctctacaaaaaaaaaaaaaaattaaccaggcatggtggcagatgcttgtaatcccagctactctggaagctgaagtaggaggactgcttgagcccaggagatcaagactgcagtgagccgtggtcatgctgcgccacagcctgagtgacagagagagaccctgtctcaaaaacaaaaacaaacaaaaaacacttaaccttcctgttttttgctgttgttgttgttgtttgtttgttttgagatggagtctcactctgttgcccaggctggagtgcagtggcgtgatcttggctcactgcaagctctgcctcccgggttcacgccattctcctgcctcagcctcccgagtagctgggactataggcgcccgccaccacgcccggctacttttttgcatttttagtagagatggggtttcaccgtgttagccaggatggtcttgatctcctgacctcgtgatccacctgcctcggcctcccaaagtgctgggattacaggcatgagccaccgcacccggccaacctttctgttttttagtttgatatgcttgttaactcagcagctgaaagaatgctgaaagtggccttcagtaaaaaaatttcactagaatctctacatccatatttaatctgaatgcatatccagattgatcagttagagcaaaaacactcatcatcattcctgatgacctctaattctggtttcggctttctatttcaatggaaacagaataaggaaagaaatggaagggctctggaaatttgtcctgggctatagatactatcaaagatcaccaacaataagatctctcctataaatataaaacaagtataattaattttttaattatttttttctcttcagaggattttatttcaagataaaacataacttctacccatactattgattccaaaggttagaaaaagtgtttttcctcatcttatccttcaaagaggtcacagcaatgcaaacatctataaaatgcctctgcataattgtcagaagctatagtccagaaatcattgaaaatgcttttccattttaagcttaggtgaggtgtcttaggaaacctctatgacaacttactctatttattgggaggtaaactcccagactctcccagggtctcctgtattgatctcattttttaggcttcctaatcccttgaagcacaatcgaaaaagccctggatctcttttctgcacatatcatcgcggaattcattcggcttccagcaagctgacactccatgatacaagcggcctcgcccttctccggacgccagtccttgctgcggttagctaggatgaggggtttgctgggcttcagtgcaggcttctgcgggttcccaagccgcaccaggtggcctcacaggctggatgtcaccattgcacactgagctcctggcaggctgtaccaattttttaattatttaatatttatttttaaaattatggtgaatattttggtattctgctctaaaataggcccataaatgcacagcagatatctcttggaacccacagctttccactggaagaactaagtatttttcttttaaagatgctactaagtctctgaaaagtccagatcctctacctctttccatcccaaactaagacttggaatttatgagagatctagctaacagaaatcccagacacatcattggttcttcccagagtgcagtcctcctaaagaggctcagccctaagcaggcccctgcaccaggagggtgggtctgagacccacatagcacttcccaaggtgcatgctccagagaggcactgaaacagctgagcacaagcctgcaagcctggagaactctcacagtcagaacggagggggcccagtgggactaacataaagagaaaagggaacacagagaaatggatggcaccaacaaccagcaaagccttcatggccaatgaaagcatcagtgacggggccagaaccctcatccccaaagactcttcactgcctttagtgaaaaacaatggctagagagtgaagttatgatcatgtatagagaggtaaagttacatttttatattctgactctgctaatgtgaaattccctatctgctagactaaaagtttcagacaccctgttcaaatatcccattagttgctagagacttaaaatgaacagaacgcacattgtcaggatgactattaccaaaaaatcaaaagacagcaagtattggtgaggatgtagagaaactggaacttttgtgcactgtttatgagaatgtaaaatggagcagctgctgtggaaaagagtatgcaggttcctcaaagagtaaaaccaagatgtggaaacaactaaatgcccatcagtggatgaaggggtagacaatatgtggtatatacataccatggagtactattcagcctctaaaaaaaaaaaaggaaattctataacatgcaacagcatggatgaatcttgaggacattttgctaatgaaataaggcagtcatagaaagacaaatactgcacgactccacttatatgagataccaaaaatagacaaattcatagaatcaaagagtacaatggaggttacctggagctgcagggcgggaaacgaggagttactaatcaacgaacataacgttgcagttaagtaagatgaataagctctcaagatcagctgtacaacactgtacctagagtcaacaataatgtattgtacacttaaaaatttgttaagggtagattaacaaatgtagtagatccacaaatgtggttaagtgttcttaccacagtaaaataaaaaaagaatatcaagcccaggagttcgagactagcctgggtaacatggtgaaaccctgtctctacagaaaatacaaaaattagccagctgtggaggtgcactcctagggaggctgaggtgggaggcttgcttgagcccaggaggtcaaggctgcagtgagccatgattgcaccactgtactccagcccagatgacagagcaagacaccaccccccccaaaaaaagaaaaagaatatcaaacattttaaaagatcagatacgcaagaacaacaacaaaaaagagatgaacagagcatcgaccctcatctagtgggattcttggtctaactgaaaaacagacattgagagacaaacaatgacagtgatgtgatcacagcaattacacaggtatcccctggggactgcagaagaaaggaggaatgcctaactttcagaaaatagagaaagcgtcaaacagttggtgaaagccttccaaaactagagagaactgcacacaccaaatcacagaaagaagaaaagccgtgggagattctgggacccaccggctatttttgatggctgaacaccctgctgcaggagagacaggagctggaaagcatggtgggatgaaacctcaaacagctttgcctgcattgcttaagatgactgggcttgattaactctagtcaatggggacaattcaatcaaagaagaaagatgctcaaattcacattttagaatgattttttatggcagtatggggaatagattaaaagagagtgaagctggaggcaagaaacttgttaagaggcaactgaaacagtctagatgataaataataaactgacagagtgactagaaaaatcagaacaggctgaatcaacagatacctagatgaaaataacaggacttgatcaccagttgtatcttggagaggaaggagttgtttccttgctttccctacgactgggaatacggaaggtttgccgtgtgtattggttatatactggtgtgtagccaatcactgacaaccatttagcagcttaaaacacaaaggcttatctcccagtttctgtgggccaggaatctaagataggcttagctggctggttctggctcagagtttctcaagaggttgcaatcaagatgtcagctggggttgcatcatctgaaggctcaactggggccggagggtccacttccaaggagttcactcacctgcctgacaaggcagtgctggttgttggcaggagatctcaattcattgccaagtgagcctctctatagcattgctggaacatcctccccatctggcagttggcttctctcagcatgagtgatctgagagagagagcaaggaggaagccacagtgttcttcctactcctactcctaacactatggacctactcctaacactctcacttctgccttattccattagttagaaagggaactaagctccacctcttgaaataagaagtgtcaaagaatttgtggatatatttaaaaatcatcacactgtggaagtggatagggggttcaattaatgctgaacttgaaatgcctgagacattcaaatgtccaacaggcaatgaacatacccatagatggtcatgactttagcaagaatagaggaagatcacagaattaaggaggaattgaaaggtaaaagaagtggagtcagattccccctgaaaagtgagccatgaaaggaactttaactattgagttagaggtcagagtaggaaatttcggtggaattcttttttaaagaaaggaaccatataagcatgttttgaggtagagggagaataaatcagtagacagggagaggtaaaaaacataaatgataggggatagttgacaaaggtcttggcagaatcccttacccattgacttggggccaagagagggacacttctttgtttgagggataaggaaaataagaaagaatgggtgctatttagtgtggtcctgtctctagggcaaacgcataggtaacaaactgtgtgtgttaggaatatagatgtgacctcacattgagattctcacctcaaatccattttgttgttacctgtaccttcctaccttctctttttgctacatgcagactgctgttttgtcttcctggcctgttccaggtttcagcattctggcatatctgctaccctgttcccaaacctctctagagtccatgctccttccttggatagtgtttgattgggccacgtatctaagaagtgatgccttcagttaggcctgagaacctcctctatggaaatctccatcagtgaccctgacagacttggtatcttggagatgtcactgctcccagcctgtggtctaggagaatctcagcctgggcctctagtagtatggataaggcgttaaggtatctttgaaccagagtctgtcatattcctcaatgtgggacagataaaacagtggtagtgctggtgtttctgagctagaactctggtttttggtctagattctttgatgtatgacctttcagaggtattaaaatttgttctaatacaatgttcaatacaaatgtagttccttttctgttaggacctcaacaaaacatgaccaactgtagatgaacattaaactatgacaattcatggaaatgaatacagtaatacctgcggttcccccattttagcagtcactatggtgacatttggcacaaatggctatttaagggtgcttttgttaaaacctaccatcttactaggcacatgatattgaaactaatgaaataatggagaaacttcttaaaaacttttaatgaataaagtgatgaagtgataatattttagctgctatttataaagtgactattacaggtcaaacattcttctagggtttttttgttgaagttgtcacatttaatccttaataacccactatgagtcaggtattcttctctcccctttggacagttggggaaatgggggtcagagaggttaggtaatttgctcagggccacacaacctgcatgtagaaaatctgagatttgtacaggaacgtatcaaactctgaagtccatgcttctattttcccatgctgcctttctaataaaaggtaactaatgctactggatgctgcccccaaagtgagtcactttcaccccaccctacttgattttctccataaaactaatcacatcctgacaacttatttattgctgatctcccccactagattataaactcaataaaagcaagatccttgtctgctgaatatcagtacctaaaacgctgtctagcacagagcaagtaattaatatttgttgaatgaacaaataaaggaaaaaaattcaaaggaagaaaaagccctaaaacagatgtttacctaaacatacattttaaaagaaagcatataacaaattcaggacagaatttaaatttgattttttaaagaaataaccaagtgctagctgggcacagtggctcacacctgtaatcctagcactctgggaggccgaggcaggcagatcacttgaggtcaagagttcaagaccagcctggccaacatggtgaaacctgtctctactaaaaatacagaaattatccaggcatggtggcaggtccctgtaaccccagctactcaggaggctgagtcaggagaattgcttgaacccaggaggcagaggttgcagtgggccaagattgcaccactgcactccagcctgagtaacaaagcaagactctgtctgaaggagaaggaaagaaagaaggaaagaaggaaagaaggaaagaaggaaagaaggaaagaaagaaagaaagaaagaaagaaagaaagaaagaaagaaagaaagaaagaaagaaagaaagaaagaaaaagaaagaaagaaagaaagaaccaagtgcttatttgggacctactatgctatgtttttccatgcacgctattttcagtaaagcagttagcaaacttgcaagatcataacaacaaatatatgcttctataactctaaaattgtgctttaagaagttcctctttaccagctcatgtatgcattagttttctaagagttactagtaactttttccctggagaatatccacagccagtttatttaaccaaaggaggatgcttactaacatgaagttatcaaatgtgagcctaagttgggccagttcatgttaatatactccagaacaaaaaccatcctactgtcctctgacaattttacctgaaaattcattttccacattaccaaggagccagggtaggagaatatagaaagaccacccaagaatccttacttctttcagcaaaatcaattcaaagtaggtaactaaacacatgccctaacaatgaatagcagattgtgctcagaagaatgatctacaacatcttactgtgaaggaactactgaaatattccaataagacttctctccaaaatgattttattgaatttgcattttaaaaaatattttaagcctaaattttaaaaggtttgatattggtacatgaatagacaaacagacatggactagaccaagaattaggttcaaacatatacaggaatttaatatacgataaatctagtattccaaaggaaccaacaaatggtgttcagacagcaggataggcatcaggaaaaacacagttgggcaccctaccttactcctaacaccaggagtaactgaaggagcaccaaatatttatttattttaattatagttttaagttctagggtacgtgtgcacaacatgcaggtttattacataggtatacatgtgccatgttggtgaggagcaccaaatatttaaaagaaaaaaattggccaggggcggtggctcacacctgtaatcccagcactttgggaggccaaggtgggcagatcacctgaggtcgggagttcgagaccagcctgagcaacatggagaaaccccatctctactaaaaatacaaaattagccaggcatggtggcacatgcctgtaatcccagctacttgggaggctgaggcaggagaatagctttaatctgggaggcacaggttgcggtgagctgagatattgcactccagcctgggcaacaagagcaaaacttcaactcaaaaaaattaataaataaataaaaataaagaaagaaaagaaaaaaatgaaaatagtataattagcagaagaaaacaccgtagaatcctcggactcttaggatggggaatgcctataatataaaaaccctgaagttataaaagagaaaatcacctacatacaaaccaaatctttctacatgcctaaaacatagcacaaacacagctaaataatcatagctgaatgaactgggaaaacaaaacttgactcatatccagacagagttaattttcctacacataaagagtacctatataaacccaacaaaaaaaccaccactaacccaaaataaaaatgtgacaggtaatgaacaggtagttcacagagaatacaaatggctcttcggcacataagatgctcagactgacttttacttatttattttttgagagacagggtctcacgatgttgcccaggttaggctcaaactcctgggctcaaatgatagtaccaggactacaggtgtgccccaccgcacctggctcctcaaccacctgtattaacaggaaatgcaaaataaaactttcaaatctattttacctattagaatggcaaaaatttgaaaaacttcaaacatcatcatgttggtgagaatgtgaggagactggcactctcattttttgctgatagcatatatatactgatggcttctatggaaagcaatctggcagcgtctatcaaatgtacaagtgcatatatcctttgacaaagcaattccactctaggaatgtgttctatatggttgtgcttcctggggctgggaactgggagctaagggacaggggcagaagataatcttcttttccctccttccccgttaaacatgttgaattttatatactgtaatatattatttttcacaaaagataatttttaagcgatatgtctgggaatttttttttttcttttctgagacagggtctcactctgtcatccaggctggaatgccatggtatgatctcagctgactgcagcctcgacctcctgggttcaagcaatcctcccacctcagcctcctgagtagctgggactacaggcacgtgccatcatgctaatttttgtatatacagggtctcactatgttgcccaggctaatgtcaaactcctaggctcaagcaatccacccacctcaggctccaaagtgctgggattacaggcgtgagccaccgcgcctggccctgggaattcttacaaaagaaaaaatatctactctccccttctattaaagtcaaaacagagaaggaaattcaacctataatgaaagtagagaagggcctcaaccctgagcaacaaacacaaaggctatttctgagacaggaatttgctgaacaaaatcgagggaagatgacaagaatcaagactcacttctcggctgggcgcagtggctcacacctgtaatcccagcactttgggaggccgaggcggacagatcacgaggtcaggagattgagaccatactggctaacacagtgaaacccagtctctactaaaaatacaaaaaattagccgggcgtggtggcaggtgcctgtagtcccagctacttgggaagctgaggcaggagaatggcgtgaacccaggaagcggagcttgcagtgagccgagatcacgccactgcactccagcctgggtgacagagcaagactctgtctcaaaaaaaaaaaaaaagactcatttctctagatcttgagccgtattcaaatttatctcagcttagtgagaggttaaagcaaggaatatccttccctgtgggccctgctccttactgaaggaaggtaacggatgagtcaaggacaccaatggagaaaagcactaacaccattatctgatgaacattacgtgaagaagggtaagaagtgaagtggaattgctgaagaagtcagtgaaagcggacattcatttggggaaatggaatataggaaatccataaaagtgattaaaaagatgttagaggctgaggcggggggaccacagggtcaggagatcgagaccatcctggctaacacggtgaaaccccatctctactaaaaatacaaaaaattagccaggcgtggtggcaggcacctgtagtcccaactactcgggagactgaggcaggagaatggcatgaacctgggagacggagcttgcagtgagccgagatcacgccactgcactccagcctgggtgacagagtgagactccatctcaaaaaaaaaagttagatacgagagataaagatccaacagacacacaactgctaattctgaacagaacaaaacaaatggcacaggaaaagaaaatttaagatataacaccggaaaactttcctgaaattgagtaactgaatctatagcttgaaagggtttagcatatgccaagaaaaatcagtagagtccaaccagcacaagacacatctagcaaggctggtgattctaccaacacagagaaagaagtgggtgacccataatgcggaaaaaggcagaccatctgcagtcttctccagaacactggagtctgaagacaaaagaatgctgcctactgagccagaagggagagaaagtgacccaacacatctttaccaagttagaatgtcacgcattatttaaaggctgcaaaagccatgaaagacatgaaagaacacaagcatttacaacatgaaagaacacaagcattctcatactcaagaatccttaagaaaaatgtagtcctaatccagcccactgaaagttaaatgtacttaatgtgctcattaatgggaacttcatagcttcaaatcagtctggtcccatctaccaacatctctcgcccggctttcctgcaatagtcagcacctttccctcctcccagtcttgtcccctggagtctgctctcagcatagcagagtgaccacatcaacacccaagtcagagccctccagtgcgcactggtctacaaagcccttcccaccccccaccccacgtgccctccggatccttgtgacgtgtctcctgcataccctagcagccctggcctcctcactgcccctcctgtacatcaggaaggcgactccttgagtcttggctctggccgcctcctccacctgcagtgagttaactcccttacctactctaggtcattgctcaaatgtcagcatctcaatggggccctccctgactaccctatttaaattctacatactccccttgaccccatggacctcactcaccctattccacttttattcttacaatttagcacttgttctcttctaacgtattctaagacttactcatttattacattgtttgccaccccctctagtacataaactccagaggggcagggatttctgtctatttattcatttctttatccctaggacatagaacagggcatagttcagagtattcaatgttatcaatgaatgaactagcagtagtaccagttccagttaggcacagaattaaatctaaatagaattaaatctcatggtctgggttaactatggatagaaaattagatataattttaagaagcctagaaagaaaaaattaataatgtaaaaataatattaatttgataataataacaaaaactctgccaggcactgtggctcaaatctgcaatcccagctactcaggaggctgaggtggaaggatcacttgagaccagagttcaagactcagcctaggcaacacggcaagaaactgtctctaaaaaaattaaaacttaaatttttaaaaaagaattctcaaagcgtcacaaaaactggagattaaggtacaggaagtgtgaagtaatattactatgctaatggttttttttttttttagaaaggtataaccaaaagatttctttctcaagtcgataaactgagaaagataagcatatcttccaattaacagagggggaggaaaagccagatacaacaaaataagatataaattagtttccagttgaaaacaagagtaggagttattttgcatcacctcacctgtgacctcccccagcccaaaaaacactactgataaacagggtagaaaagcatcatctcagataaagcaggaaaaactgccacagtctcaaaccacaaactataagcacacacctggccaaccctgccaagtctgggctcagtaggaggaacgtgctgagagctaggatgtaccaacttagacattctgtgggatacagatgtccctggaagggtcacaccatctcaaaggcacctgtaatgcccactgattacagccaccatatgtgagagagaaactcagggcacttagagagtataacaagaaccttatgtcatctgagatgaggaatcctcagccctgcaaattaaccaactctttagaacaactggcaaaacataaatatccacaacttttgtttcagtaattccactcttagatatcaatccaaagtacatgagacagcagatacacacacaaaatggtatttactgcagcattgtttataatagcaaaaaacaagaaataatccatatgtctcaataggatactgggtacatgagggtatgtacccatcattcaaccatcaaaaagagtgatatggatgtccacagatggacataaaaagctgtgtgttacgtgaaaacaaactcaagcagcagcaggatgggcttatgatagtcagtatgagctaatttctggaaaaaaaaatctagtgtgtgcacagaaaacatctgaaagaacagaaacaaaactatcagcagaatattgagatgttttactaagttgtatatctatactgcttgtaatttttaccccaagcaagaattactttttggaaaaagaaaattcaggaaataaagcatttctttaaacttcatgtttaaacaaatggtgatggaataaaagagttcttattcatcataaacacacacagcacacatgcacgcatgtgcgtgagcacaccctttacttgataaataccatgttgaatattttagtctttccttttaggttctatcccttcactcaaaatgcggttataaataaatgtacttttcatgtgccttctgcctaaacccactttaatataactttacagtcccattatcattatagtctcaaagctagactcagcctgaaactaccctttcatttggaacccttattaaaatgccacatacagctccttcaaataaaaacaaaccctaggacctgacactaggcttcctttgttgctactcataatggccaagttctgtgcttataatacatcttctttcattttattgctacatatccaagggttttatatgtttttcttattatatcttaattcaaaacaccatcacgctcttttccagatgaaaataaggaaaagaaattgagcaactgactgacttaaaggtcataaaactatatagtagcagagtcagcaaaagaagaaacacacatctcccaagtagaggctgaaaaccagtaccattcacctccagggtgagctatatacagattacaaagtcaccttctctaaatgttcaaactgaatcccatacccatactttaccactacctcgtaagaacagcctcagatcttgttatagccttttttttagcatgctgaagccaataaaatgcttcccattcagcaagagaaacaagttctgaaacactgaataatctgcccagggcctatgaacatttccactgtgagaaatgttctccactgtgtggagaagatccttactcttctccacacaggcagaacattagaaaaattcttggattctatgatgcacagcttaggagtctgtttagcacaatttaagtccaaatagttattaaatcctcctctgttccagaaacagtgctaaatactgtgaatataaaaattgaaaagatactctcctggctcccaagaaagtcagccagatagaggagacacaggcacacaaatcactgtcacatgaagctctacctccctaacttcaaacgagggcctaagtcaccaagaatacagtagcagttgtgactacgagtaactactataattcaatactttatcttcccttagaaaactcttctcccttggaaatttatttgcatttctaaataccattccttactaaaaggaagcagggctccttggggaaatagctgattctaggtgtggactatgaaatgaaaatggtgagtctgggacatcccatgttgcccagaaatcaaggaactgcccaaagattaacagagtcatgttaaatggacctaagagtgaaccagaaggagctcactttgccccgcgtggaacaatttcaagaaaaacatgacagtaatgaattataaaacatgaattaaaatacatattggtactaaaaagagaacaaaaggatgtggctttggataaagctcttcttcatggaagaataccagctaataaatgtaaaggaaatgagagaattagaaaaattatcattttgtaaaccttaatatattcacctagacatgctaaaaccactgagtaaaaggctgcttgggaagaggatgctcacatgatctcagagtttcacaccacagataatttattagatacaggaaggaagatgtgatcaagcttcctgtgacccccagccaggccccacaacactatgtgcctccttgtgatgtgggagctacacagcatcgcccacacagcttctcgccaaaactgtttgaagctaatcacaagggaagaactggacagcttctgaccatgagacgctccaccagacaacttgcttggcctctccaaagaaacttgcttggcctctccaaagaaaactcagtttcatttaaaaacaaaactaattatttaaaaacaaacgaaaagcaagttgtggacttgagctccagggacagagcagacatacttttccctgttcttcccagtaagtggtaataaaaaccctcaacactagatataaaacaaatataagaaggttctggaaggggaagaggaggcagactatccaggtgccttgaggcccacagaacaacccagtgatgggttcactgggtcttctttttgcttcattatctcagacttggagctgaagcagcaggcaacttcaaaacaccaaggggcacagattgaaaagccccaagaaaagcctgccctctctagccaaaggaccaggaaggagacagtctaatgagatggaacacatttagacagtaactgcccatttaccagcaataactgagcagggagcctagacttccagtcttgtgaggacgtaccaaggtacccaacacccccaccaaggctgagtaaggactgcgacttttatccctgcatggcagtagtaaggagcccatccctcacccgccagcagtgtcaggggaacctggacttccactcccacccaggagtgatgaggccctccctgctggggtcatgtcagaggaggcctagtggagattcagtgacttaaccttttcccagagataatgaggccacctttcctccctcttcccccatggtgacagtgaaagcactgtggcaagcagtaggcactcctacccctcctagccagggaggtatcagggaggccaagtagggaaccagaatacccacaaccacccagcagcaacaggggtcccccaccccattgggtgtcaatggaagcagagcggaaagcctggatatttacccccatctagaagtaacaagctgatgtcccccttcttctactacaatggtgttcaaaacaggtttaaataaggtctagagtctgataacgtaatacccaaatcgttgaagttttcattgaggatcatttataccaagagtcaggaagatcccaaactgaaagagagaaaagacaattgacagacactagcactaagagagcacagatattagaactacctgaaaggatgttaaagcacatatcataagcctcaacaggctgggcgcggtggctcacgcctgtaaccccagcactttgggaggccgaggcaggtggatcacaagatcaggagatcgagaccatcctggctaacacggtgaaaccccgtctctactaaaaatacaaaaaaaaatagcaaggcatggtggtgggcacctgtagtcccagctactcgggagcctgaggcaggagaatggcatgaacctgggaagaggagcagtgagccgagatcgcaccaccgcactccagcctgggcaacagagcaagacttcgtcccaaaaaaaaaaaaaaaaaaaaaaaaagcctcaacaaacaactacaaacgtgcttgaaacaaatgaaaaaaaaatcttggcaaagaaataaaagatatatattttggccaggtgcagtggctcacagcctgtaatccctgcactttgggaggctgaggcaggcggatcacctgaggtcaggagtttgagaccagcctgaccaacatggagaaaccccgtctctactaaaaatacaaaattagccagtcatggtggcacatgcctgtaatcctagctactcaggaggccgaggcaggagaatcgcttgaactcaggaggtggaggttgcggtgagccgagatcccgccattgcacattgcactccagcctgggcaacaagagcaaaactccatctcaaaaaaatagatacatattttaatggaaattttagaattgaaaaatacagtaaccaaattgaatggaaagacaacatagaatggagggggcagacaaaataatcagtgaacttcaacagaaaataatagaaattacccaatatgaagaacagaaagaaaatagactggccaaaaaataaagaagaaaaaagaggagcagcaggaggaatgatggaaaaagagaaaggaaggaaggaagggaaggagggagggaaggagtgagggagaaagtctcaaagacctctgagactaaaataaaagatctaacacttgtcatcagggtccaggaaagagacaaagatggcacagctggaaacgtattcaaaaaataatagctgaaaacttcccaaatttggcaagagacataaacctatagattcgaaatgctgaaccccaaataaaaagcccaataaaatccacaccaaaatacatcatagtcaaacttctgaaaagacgaaaagagaaaacgtcttgaaagcagtgagtgaaacaacacttcatgtataagggaaaaacaattcaagtaacagatttcttacagaaattaaggaagccagaaggaaatgacacaatggttttcaagtgctgaaagaaaagaagtgtcaacacaaaattctagattcagtaaaaatatccttcaagaatcaatgggaaatcaagacagtctcagataaagcaaaataagagaatatgttgccagcagatctcccctaaaggaatggcaaaaggaagatcatgcaacagaccaaaaaatgatgaaagaaggaatccagaaacatcaagaagaaagaaataacatagtaagcaaaaatacatgtaattacaataaaatttctatctcctcttaagacttctaaattatattgatggttgaagcaaaaattataaccctgtctgaagtgcttctactaaatgtatgcagagaattataaatggggaaagtataggtttctatacctcattgaagtggtaaaatgacaacactgtgaaaagttacatacacacacacacgtaagtatatataaatatatgtgtgtatatgtgtgtgtatatatatatatacatataatgtaatacagcaaccactaacaacactatacaaagagataataaccaaaaacaatttagataaattgaaatggaattctaaaaaatattcaaatactctacaggaagacaagacaaaaagagaaaaaaagaggaggacaaactaaattttttaaaaacataaataaaatggtagacttaagccctaacttatcaataattacataaatgtaaatgatctaattatatcaattaaaagacagagatagcagagttaatttaaaaacatagctataagaaacctgctttgggctgagtgcagtgactcacacttgtaatcccagcacttcgggaggccaaggcgggtggatcacctgaggtcaggagttccagaccagcctggacaacatggtaataccccatctctactaaaaatacaaaaaaattagccaggcatggtggcacacgcctgtagtcccaactactcaggaggctgcgacacaagaactgcttgaacccgggcagcagaggtagcagtgggccaagattgcgccactccagcctgaacgacagagtgagactccacctcagttgaaaaacaaaaaagaaacctgctttaaatataccaacatatgttggttgaaattaaaagaataaaatatatcatgaaaacattaatcaaaagaaaggagtggctatattaataacataaaatagacttcagagaaaagaaaatttcaagagacaggaataaaaggatcaagaaaagatcctgaaagaaaagcaggcaaatcaatcattctgcttggagattcaacaccctctcttaacaactgatagaacaactagacaaaaaaatcagcatggagttgagaagaacttaacaccactgaacaacaggatctaatagacatttacggaacactctacccaacaatagcaaaataaacattcttttcaagtattcactgaacatatccttagaccctaccctgggccataaaacaaagctcactagtgattgccgaaggcttggatggacagtggaagagctgcatggggagggagaaggtgacagttaaagagtgtaggatttctttttgggataatgaaaatgttccaaaattgattgtggtgatgttggcgcaactctacaaatataaaaaaggccattgaattgtacgttttaagtgggtgaaacatatggtatgtggattatatctaacgctttttaaaaacttaacacatttcaaagaatagaagtcatacagagtgtgctctactggaatcaaactagaaagaggtaactggaggataacgagaaaagcctccaaatacttgaaaactggacagcacatttctaaaatcatccgtgggtcaaagatattcatttctgatattcatttttattgtttaatgtatttttaaaaatttcttaagggaaataaactgactaaaaatgaatatggctgggtgcggtggctcacgcctgtgatcccagcactttgggaggccgaggctggtggatcacaagatcaggagttcgagaccagcctggccaagatggtgaaaccccgtctcaactaaaaaactacaaaaagtagccaagcgcagtggcgggagcctgtggtcccagctacttgggaggctgaggtaggagaatcgcttgaacacaggcagcagaggttgcagtgagccaagattgtgccactgcacgccagcctgggcgacagagactgcctcaaaaaaaaaaaaaaaaaaaagaatatcaaaatttgtgggacatagttaaagcaatgctgagagggaaatttataacactaaatgtttacattagaaaagagaaaaagtttcaaatcaatagtctccactcccatctcaagaacacagaagatgaagagcaaaataaacccaaagcaagcaaaagaaagaaaatataaaaataaatcagtaaaattgaaaacagaaacacaataaagaaaatcagtgaaacaaagtactgattcttcgaaagattaataaaattgacaaacctctagcaaggctaacaaacaaaaaagaaagaagacacggattaccagttattagaatgaaagcataattagaaacaactctacacattataaatttgacaatgtagatgaaatggactaattactgaaaaaacacaaattaccacaactcacccaatatgaaatagataattgggatagcctgataactactgagaaaattgaatttgtaattttaacactcttaaaacagaaacattaaacttaatattttataaatattagataaggtaattatacccttccttaacaaataaaaacgacaaattattttgcagctaaagagatgtatgtactgtgaaaaatatcttcagaaaaatagaactttgtttgaagaataaggatttaaaaaatgtttttaactctcaagaagcaaatatctgggcccagatggtttcactgaagaattctaccaaatgtttaatgaagaattaccaccaactctacatagcatctttgagaaaactgaagagaagggaacatctcccagttcattttatgaagtgggtgttactctgatactagaactgtataaggacagctactcttgacacactgcctatgggtagctctgctctgcaggaacagtcagaaaaaaaaaaaaaagaagcactggacaagggcagtataaaaaaagaaaactgggccaggtgcagtggctcacacctgtaatctcagcactttgggaggctgacgctggtggatcacctgaggtcaggagtttgagactagcctggccaacatggtaaaaccctgtctctactaaaatacaaaaattagccaggcagggtggtggggaaaataaaaaggaaaaaaaaacaaaaataaactgcagaccaatatccttcatgagtatagacacaaaactccttaaactccttaacaaaatattagcaagtagaagcaatatataaaaataattatacaccatgatcaagtgggacttattccagaaacgcaagtctggttcaacatttgaaaacaaggtaacccactatatgaacgtactaaagaggaaaactacataatcacatcaatcaatgcagaaaaaagcatttgccaaaatccaatatccattcatgatactctaataagaaaaataagaataaaggggaaattccttgacttgataaagcttacaaaagactacaaaagcttacagctaacctatacttaatggtgaaaaactaaatgctttcccctacgatcaggaacaaagcaaggatgttcactctcattgctcttatttaacatagccctgaagttctaacttgtgcaaaacgataagaaagggaaatgaaagacctgcagattggcaaagaagaaataaaactgttcctgtttgcagatgacatgattgtctcatagaaaatgtaaagcaactaggggtaggggggcagtggagacacgctggtcaaaggataccaaatttcagttaggaggagtaagttcaagatacctattgcacaacatggtaactatacttaatatattgtattcttgaaaatactaaaagagtgggtgttaagcgttctcaccacaaaaatgataactatgtgaagtaatgcatacgttaattagcacaacgtatattactccaaaacatcatgttgtacatgataaatacacacaattttatctgtcagtttaaaaacacatgattttggccaggcacagtggctcatacctgtaatcccagcattttaggaggctgaggcgagcagaaaacttgaggtcgggagtttgagaccagaatggtcaacatagtgaaatcccgtctccactaataatacaaaaattagcaggatgtggtggcgtgcacctgtagacccagctacttgggaggctgaggcacgagaattgcttgaacaagggaggcagaggttgcagtgagctgggtgccactgcattccagcctggtgacagagtgagactccatctcaaaaaaaataaaataaagcatgacttttcttaaatgcaaagcagccaagcgcagtggctcatgcctgtaatcccaccactttgggaggccgaggcaggcagatcacaaggtcaggagtttgagaccagcctgaccaacatggtgaaaccccatctctactaaaaaatatataaattagccaggcatgtgtagtctcagctactcaggaggctgaggcaggagaatcacttgaacccggaggcagaggttgcagtgttgagccaccgcactccagcctgggtgagagaacgagactccgtctcaaaaaaaaaaagcaaaataacctaattttaaaaacactaaaactactaagtgaattcagtaagtctttaggattcaggatatatgatgaacatacaaaaatcaattgagctggacaaaggaggattgttttaggtcagtagtttgaggctgtaatgcacaatgattgtgcctgtgaatagctgctgtgctccagcctgagcagcataatgagaccacatctctatttaaaaaaaaaaaaattgtatctctatgtactagcaataagcacatgggtactaaaattaaaaacataataaatactgtttttaattgcctgaaaaaaatgaaatacttacatataaatctaacaaaatgtgcaggacttgtgtgctgaaaactacaaaacgctgataaaagaaatcaaagaagacttaaatagcgtgaaatataccatgcttataggttggaaaacttaatatagtaaagatgccaattttatccaaattattacacaggataacattattactaccaaaatcccagaaaaattttacatagatatagacaagatcatacaaaaatgtatacggaaatatgcaaaggaactagagtagctaaaacaaatttgaaaaagaaaaataaagtgggaagaatcagtctatccagtttcaagacttacatagctacagtaatcaagactgtgatattgacagagggacagctatagatcaatgcaaccaaatagagaactaagaaagaagcacacacaaatatgcccaaatgatttctgacaaaggtgttaaaacacttcaacgggggaagatatgtctctcattaaagggtgtagagtcattgcacatctataggcaaaaagatgaacctgaacctcacaccctacagaaaaattaactcaaaatgactcaaggactaaacataagatatacatctataaaacatttagaaaaaggccacgcacggtggctcacgctcgtaatcccagcactttgggaggccaaggcaggtggatcacctaaggtcaggagtttgagaccagccggatcaacatggagaagccccatctctactaaaaatacaaaattagctggacgtggtggcacatgcctgtaatcccagctacttgggaggctgaggcatgagaatcgcttgaacccggggggcagaggttgcggtgagccaagatcacaccattgcactccagcctgggcaacaagagcaaaactccaactcaaaaaaaaaaaaaaaaaggaaaaatagaaaatctttgggatgtaaggcgaggtaaagaattcttacacttgatgccaaactaagatctataaggccagtcgtggtggctcatgcctgtaattccagcactttggtcaactagatgaaaggtatatgggaattcactgtattattctttcaacttttctgtaggtttgacatttttttagtaaaaaattgggggaaagacctgacgcagtggctcacacctgtaatcccagcactttgggaggccggggcaggtggatcacacggtcaggagttcgagaccagcctggccaacatggtgaaaccccgtctctaccaaaaatataaaaaattagccgggtgtcatggtgcatgcctgtaatcccagctactgaggaggctgaggcaggagaatcacttgaacctgggaggtggaagttgcagtgagccgagattgtgccactgcactccagccttgggtgacagagcgagactccgtctcaaaagaaaaaaaaaaaaaagaatatcaaacgcttactttagaaactatttaaaggagccagaatttaattgtattagtatttagagcaatttttatgctccatggcattgttaaatagagcaaccagctaacaattagtggagttcaacagctgttaaatttgctaactgtttaggaagagagccctatcaatatcactgtcatttgaggctgacaataagcacacccaaagctgtacctccttgaggagcaacataaggggtttaaccctgttagggtgttaatggtttggatatggtttgtttggccccaccgagtctcatgttgaaatttgttccccagtactggaggtggggccttattggaaggtgtctgagtcatgggggtggcatatccctcctgaatggtttggtgccattcttgcaggaatgagtgagttcttactcttagttcccacaacaactggttattaaaaacagcctggcactttcccccatctctcgcttcctctctcaccatgtgatctcactggttccccttccctttatgcaatgagtggaagcagcctgaagccctcgccagaagcagatagtgatgccatgcttcttgtacagcctacaaaaccatgagcccaataaaccttttttctttataaattatccagcctcaggtattcctttatagcaagacaaatgaaccaagacagggggaaatcaacttcattaaaataatctatgcagtcactaaacaaataagaacaagaggctccagaagtgggaagccaatacccagagttcctacaatacagtatctgaaaagtccagtttccaaccaaaaaatatatatatacaggccggacatggtagcttatgtctgtaatcccagcactttgggatgctgaggcgggcagatcaccctaggtcaggagttcgagaccagcctggccaatatggcaaaaccccgtctctactaaaaatacaaaaattagccaggcatggtggtggatgcctgtaatcccagctactcgggaggctgaggcagggaatcacttgaacccaggaggcagaggttgcagtgagccgagatcacgccactgaactccagcctgggcaacaaagtgagactccacctcaaaaaaaaaaaaaatatacatatatatatgtgtgtgtgtgtgtgtgcgcgcgtgtgtgtatatacacatacacatatatacatatatacagacacacatatatatatgaagcatgaaaagaaacaaggaagtatgaaccatactttctgtggttatgataggatggggtatcacgggggaagtagacaagggaaactgcaagtgagagcaaacagttatcagatttaacagaaaaagactttggagtaaccattataaatatgtccacagaattaaagaaaagcgtgattaaaaaaggaaaggaaagtatcataacaatattactccaaatagagaatatcaataaaggcatagaaattataaaatataatacaatggaaattccggagttgaaaggtagaataactaaaatttaaaattcactagagaaggttcaacactatatttgaactggcagaagaaaaatttagtgagacaaatatacttcaatagacattattcaaatgaaaaataaaaagaaaaaagaatgaagaaaaataaacagaatctcagcaaaatgtggcacaccattaatcacattaacatatgcatactgagagtaccggaagcagatgagaaagaggaagaaaaaatattcaaatgatggccagtaacttcctagatttttgttttaaagcaataacctatacaatcaagaaactcaatgaattccaagtaggataaatacaaaaagaaccacaaacagatacaccatggtaaaaatgctgtaagtcaaaaacagagaaaatattgaaagcagctagaggaaaacttataagagaacctcacttacaaaagaacatcacttataaaagaaccacaataatagaaacagttgacctctcatcagaaacaatgaatgataacatatttgaagtgctcaaagaaaaaaaataaagattcctatatacgacaaagctgtctttcaaaaatatacatccaaaaggattgaaaccagggtcttgaagagttatttgtacatccatgttcatagcagcattattcacaatagccaaaaggtagaagcaacccaagggtccatcgacaaataaataaaatgtggtatatgtatacacaatggaatttattcagtattaaaaaggaatgaaattctgacacatgctacaacatggctaaaccttgagaacactatgctaagtgaaataagccagccacaaaaggacaaataccatattacttcacttgtatgaaatacctagggtagtcaaattcagagatagaaagtaaaacagtggttgccaagggctgagggagggagtaacgtggagttattgttgaatgggtacagaatttcagttttgcaagataaaaagagttctggagacagatggtggtgagggtggtacaacaatacaaatatactttatactactgaacagtatacttaaaaatgattaacatggtgaaaccccgtctctactaaaaatacaaaaaaattagctgggtgtggtggcgggcacctgtaatcccagctacttgggaggctgaggcagcagaattgcttgaaaccagaaggcggaggttgcagtgagctgagattgcgccaccgcactctagcctgggcaataagagcaaaactccgtctcaaaaaataaaaaataaaaaaaatttaaaaatgattaagcaggaggccaggcacggtggctcacacctataatgccagcactttgggaggccgaggcaggcgatcacttgagaccaggagtttgagaccagcctggccaacatggcaaaaccctgtctctgctaaaaatacaaaaattagccaggcatggtggcatatacttataatcccagctactggtgagactgagacacgagaattgcttgaacccaggaggcagagattgcagtgagtcgagatcgcgccactgaattccagcctgggcgacagagcaagattctgtctcgaaaaaacaaaaacaaaaacaaaaagcaaaaccaaaaaataattaagcaggaaacgagattgctgctgaggaggagaaagatgtgcaggaccaaggctcatgagagcacaaaacttttcaaaaaatgtttaatgattaaaatggtaaattttatatgtatcttaccacaaaaaaaagggctggggggcaggaaatgaaggtgaaataaagacatcccagagaaacaaaagtagagaatttgttgccttagaagaaacaccacaggaagttcttcaggctgaaaacaagtgaccccagagggtaatctgaattctcacagaaaattgaagcatagcagtaaaggttattctgtaactatgacactaacaatgcatattttttcctttcttctctgaaatgatttaaaaagcaattgcataaaatattatatataaagcctattgttgaacctataacatatatagaaatatacttgtaatatatttgcaaataactgcacaaaagagagttggaacaaagctgttactaggctaaagaaattactacagatagtaaagtaatataacagggaacttaaaaataaaattttaaaaaatttaaaaataataattacaacaataatatggttgggtttgtaatattaatagacataatacaaaaataccacaaaaagggaagaagacaatagaactacataggaataacattttggtatctaactagaattaaattataaatatgaagtatattctggtaagttaagacacacatgttaaaccctagatactaaaaagtaactcacataaatacagtaaaaaaataaataaaataattaaaatgtttgtattagtttcctcagggtacagtaacaaactaccacaaattgagtggcttaacacaacttaaatgtattttctcccagttctggaggctaaacacctgcaatcaaggtgagtacagggccatgctccctgtgaaggctctaggaaagaatcctcccttgtctcttccagcttccagtggttctcagtaaccctaagtgctccttggcttgtagctatatcattcctagcaaccagaaagaagaaaataataaagattatggcaaaaaataatgaaatcaaaaggagaaaaatggaaaaaaataaataaaaccaaaagctagttctttgaaaagatcaaccaagttaacaaaccttttaactagactgacaaaaaggaggtaagactcaaattactagaatcagaaataaaagaggggacattactaatgagggattagaaaagaatactacgaacaaatgtgtgccaacaaattagaaaacttagatgaaatggacaggttcctaggacaacatcaactaccaaaatttactcaagaagaaagagacaatttgaatgagctataacaagggaagagactgaattgacaaccaagaaactatccacaaagaaaatcccaggcccagaagatttcactgtgaaattctttcaaacttataaatataaattaacatcagttcttcacaaactcctccaaaaaaaagaacagatctctatttacaggcgatacgatctttagaaaatcctaagggaactactaagacactatgataactgataaacaagttcagcaaggctgcaggatagaaaaccaatatacaaaaatctattatatttctatacacttgcagtgaacaacccaaaaatgagattaagaaaataattcaatttacaataacatcaaaaagaataaaaacactcaaaaataaatttattcaagtaagtgcaaaacttatactctagaagctacaaaacactgttaaaagaaattaaaggtttacataaatgaaaaactatcccatgttcatggatcaaaagacttattactggcaatgctctccaaattgatctataaattcaacaaaatccttatcaaaatcccagatgaggctgggggtggcggttcatgcctgtaatcccagcactttgggaggctgaggcacgcagattacctgaggtcgggagctcgagatcagcctgaccaacatggagaaaccctatctcttctaaaaatacaaaattagtcaggcgtggtggcacatgcctataatcccagctactcgggaagctgaggcaggagaatcgcttgaacccaggaggcagaggttgcagtgagccaagatcgtgccattgcactccagcctgggcaacaagagcaaaattccatctcaaaaaaaaaaaaaaaaaaatcccagatgacttcactgttgaaattgaaaagattattctaaaattcacatggaattgcaagaccttgagaatagccaaaacaaacttgaaaaacacgaacaaaatataggatgactcacttgccaattgcaaatgttacgacacagcaacagtaatcaagactgtgtggtactggcaaaagacacatacatacatacatatcaatggaatataattgagagtacagaaacaagcctaaacatctatggtaagtgcttttctatttttttctttttttttttcttttttgtagagatagaatctcaccatgttgcccaggctggtcttcaacttctgggctcaagcaatcctcccactgtggcctcccaaagtgctgggataactggcatgagccaccacatccagcccagatgattttcaaaaaagtcaacaagaccattcttttcaacaaataggtctgggatgatcagatagtcacatgaaaaaaaaaatgaagttggaccctccatcacactaaagtgctgcgattataggcatcagccaccacatccagcccaaatgattttcaaaaaggtcaacaagaccattcttttcaacaaataggtctgggataatcagatagtcacatgaaaaaaaaaatgaagttggaccctccatcacaccatatgcaaaaattaattcaaaaatgaattgatgacttaaacgtaagagttacgactgtaaaactcttagaaggaaacatacgggtaaatcttaaagacgttaggtttgacaaagaattcttagacatgacaccaaaagcatgaccaactaaggtaaaatagggtaaattgtacctaccaaaatgaaaaacctttgtgctggaaaggacaccatcaagaaatggaaagccaaaatagccaaggcaatattaagcaaaaagaacaaagctggaggcatcatactacctgacttcaaagcaacagtaaccaaaacagcatggtactagtagaaaaacagacacatagaccaatggaacagaataaagaacccaaaaataaatccacatatttatagtcaactgatttttgacaatgacaccccttcaataaatgatactaggaaaactggatatcgatatgcagaagaataaaactagacccctatctctcaccatatagaaaaatcaactcagactgaattaaagacttgaatgtaagacccaaaactataaaactactggtagaaaacataaggaaaaacgcttcaggacattggtccaggcaaagatcttatggctaaaacctcaaaaacacaggcaacaaaaacaaaaatggaaaaatagcactttattaaactaaaaagctcctgcacagcaaaggaaacaacagaatgaaaagacaacctgtagaatgggagaaaatatttgcaaactatccatccatcaagggactagtatccagaacacacaagtgactaaaacaactcaacagcaaaaaagcaaataatctggtttttatatgggcaaaagatctgaataaacattctcaaaggaagacatacaaatgtcactatcattctgccagtaccacactgtcttgattacttgttagtgtataaatttttaaattgggaagtgtgagtcatcctacactttgttcttgtttttcaagtttgttttggctattctgggagccttgcaagtataaaatagccaacaagtatgaaaaaatgctcaccatcactaatcatcagagaaataaaaatcaagaccactatgagatatcctctcactccagttagaatggctactatcaaaaagacaaaatataatggatgctggcaaagatttggagaaaggggaactcctatacactgtgggtagggatgcaaattggtaatggccattatggaaaataatactgaggtttttcaaaaaactgaaaatagaactaccatatgatccagcaaccctactactgggtatttatccaaaggaaagaagtcagtatactgaagaaatatatgcactctcatgttaattgcaacactgttcacaacagccaagacagggaataaatctaaatgtgcatcaacagatgaatggataaagaaaatgtggcatatacactcaatagaatactattcagccattaaagaagaatgaaatcctgtcatcccagcaacatggatgaacctggaggacattatatttaatgaaataagtaaagcacaaaaagataaacagtacatgttctcactcagacatgggtgctaaaaagaaaatggggtcacagaattagaaggggaggcttgggaaaagttaatggataaaaatttacagctatgtaagaagaataagttttagtgttctatagaactgtagggcgagtatagttaccaataacttattgtacatgttcaaaaagctagaagagattttggatgttcccagcacaaaggaatgataaatgtttgtgatgatggatatcctaattaccctgattcaatcattacacattgcatacatgtatcaaattatcactctgtacctcataaatatgtataattattacgtcaacaaaaaaaggaaaaaaaagaaaattaagacaacccacataatggaagaaataaaatatctgcaaattatatatatctgataaatatttaatatttataatatataaagaactcctacaactcaagaacaacaacaaaacaacccaattcaaaaatgggtaaaagccttgaatatacacttatctaaagactatatacaattggccaataaagacacgaaaagatgctcaacatcactagtcatcagggaaatataaatcaaaaccacaatgtagaatgtagacaccacttcatatgcactaggatggctagaataaaaaggtaataacaaatgttggtaaggatgtgaaaaaatcagaaacctcattcgctgctgttgggaatgtaaagtgatgcagccactttggaaaacagtctggcagctcctcaaattattaaatacagagttaccgtatgacccaggaatattcctcctgggtctataaccaaaaaaatgaaaacatatatccacataaaaacttgtacatgggcatttatagcaacattattcataacagcaaaggtggtaagaacccatatgcccatcatctgatgaacaggtaaataacatgcggtattatccatacactagaatattatctgcccatacaaggagtgacatccagctacatgctacaaggatgaatctcggaaaccttatgctaagtgaaagaagccagtcacaaatgaccacagattatgattccatgcatcggaaatgaccagaatagggaaatctatagagacagaaagtagattagtggttgggtggggctgggaggacaggtagtacactactttcccagaactactggaacaaagtaccacaaactggggagcttaaacatagaaattgatttcctcacagttctggagactaggactctgagatcaaggtgtcagcagagctggttctttctgagggccctgaggcaaggctctgtcccaggcctctctccttggctggcaggtggccatcttctccctgcgtcttcacatcatcttttctctgtgtgtgcccatgtccaaattttgattggctcattctgggtcatggccaattgctatgcacaaagtgaagtctacttccaaaagaagggaagagggaacactgactaggctaaacttatagtcattttaatgtccgcttttcctatgagattgtgaacacacagaagtagggtttttatctacattgtgcaaagtttaataagaaaaatagaattcaagagaagcagttcaatagcaggaatttaatatgggaactaattacaaggtttagggcaggactaaaaagccagttgggatggtgagccaacccagagattagcaacagtgggaccccatctacctaccacccatgaagctggaaggataaaggaggggctattatcagagtccacaagccagtgtcagagtccttggctggagctgggaccaccctagagacactgtgcaaagcagaaaacaagggggaaaaaccctgacttctcccttcctcccacctttcaatctcccactagtgcttcctactagccatacttggccagagacagtgacaaggaacactgcaaaatgaagtttgtaggaatcatctccctctgagacagagaaatatggaagggtagaaaatgaatcagaggataaagagaaaaaaccctgagtactatcttatttatctttgtatctccagtgcctaatctgtctctcaaaaaaggaaagcaattgagagaaactgaaaactccaattgaaatgaaagaatggagaattactggactagaagagaagagaaaaatttattccgcatagagtaaacaagaatggattcacaaaggacgtgatgaatgaaaagctataatcagcaaagatttgccagagaaattaaaaagtggtaaactcagccacgctgtacaacctgaaggcacaatgcatgaaaacgtttcaagaaatgacaagatttgaagtcaaattctaagtgcttttccagaatctctcaagacgattatatagctaccccattttattaaataaaatggaaacttactaaactttccccttgtattaaactaacatatgtcctaatagcaaacgattctggaattcctagagtaaaatatatttcgtcaaagtgtattgctcttttaatattctgctgacctccttttgctatttaggatatttgtatacacatcacacgtaaatttggtctatagtttacatctacgggcttatactgttctttttttcatttttttaaaatttccaacccccagtatccatatactgctctctatcagggttattttaactttgtaaaatcagctgagatgctttccatgttttttttttttattttctgccacatttgaatagcataggagttaccaccatcaaccttggattatttaagcattcacgattccacgtgtggattttttattcagagtctttcttgtcattcctgctatcagcacagaacccaatctcagctttccagctatactctcaccccatggaatttgcagatgaagttcaaaaggacctttgcattatcctgcctcgccctcttcccccttcatttagacatcaccttcttctagaacgtcttacctgacatgccctgctcccaacccctgctgcccaattgtgtgctctcccgtgtcctggcctgccatcctctttagtaattgcctgctccctcatctgtctccccacccagacattaagctgaatagactggatttgtgtcttgtccatcactataatctcagcacctagtacctagtaggtacttaccatgtattcattagcaaaatgttatgtataaccttgcaccttaaaaacaagagaaggaagacaaaattaagtcttaagactatggtttagaacatggatcagaaactacagtctgcagcccaaatccagaccaaatgaagagaccatgttcatttacatacaacctatagcagctttcacactacaggagcagagctaagtagttccaagggaacacacggccctgcaaagcctaaaatatttactctatagctcttcacagaaaaagttttcagatccctcgtttagaactcttgttcatatgcaatttcactaaaccatagttttttgggtttgtttggttttttttggcaaaaaggaatgagccgatccagaaaaggttgaaaagaatgaatcattactgctgaaagaatgtgcacacagtccgtcagtattctgctgccatgctgacacccatccaatagtgtcatgagatgcagcagctactactgtgttctcaatgccgagtccacccactccataaccatgtccaagcaatcttgggaacatcatcaccatgcttgtttatccttaaggtattgcctcacatacagcagtggctggtcataaagtcaaatgacactagtggccaggaggtcaagagaatgagtgaggacaggtgggtaggcagcccaggccctagcaacagcaggagctcacccctcagtcactctagccaggactgaaatacttttcaccctttcaagagagactaggaatctggatttttatgtgaaatatcttgattactaaatgttgtcaacagacatgtcaaaaggtaaaactaagtaagttcatggggcagattgactattcaggttatagaattaaggattcttatccaacacagataccaaccaaaaagctgacgtataacatattaggagaaactatgtgcactgtcgaaacatcaacaaggggctaatgtctaaaatagtctatattggattccagttgaaacatggggaaaggacatgaacaggcaacttatgtcaatggaaactcaaaaagataacaagcatatataaaagcattctcaaattcagtagtaaacagacagatgcaaataaaaagagggaaactgctgccgggcacagtggctcacacctgtaatcccagcactttgggaggccgaggcgggcggatcatgaagtcaggagatcgagaccatcctggctaacatggtgaaaccccgtctctactgaaaacacaaaaaattagccaggcgtagtggtgggcaccagtagtcccagctactcaggaggttgaggcaggagaatggcatgaacccaggaggcggagattgcagtgagccgagaccatgccactgcactccagcctgggcgactgagtgaaactccatctcaaaaaatataataataattataattataataataataaatagtaaataaataaaaagagagagactgctaaagtctagaaagttgaatgatgccaagcgcatgcaaagatcagggccttgggatggccgggtgcagtggctcacgcctgtaatcccaccactttgggaggccaaggcgggcggatcatgaggtcaagagatcaagaccatcctggccgacacagtgaaacccggtctctactaaaagtacaaaaaaatatatatatatatatatattattatattatatatatatatatcagagccttgggaatccttgtgtgctgctggggaaggtagtggtgcagccacccttgacagcaatctggcagtacttggttatattaagtataggcacacaccacgaccaggcagtcctactcctgggtctaaatcccaaagaattctcacacaagtccataaggagacatgtacgaggctcattcagcattactgggagtgggaatcaacctgggtgtccatctacaggagacgagatggacaaaatgtggtggatattaagaccagaatcaccaagtaacagagatgggtggtgagtgacaatcctaagatacagaataaaggctagaacatgatgccattcatgtaaattaaaaatagatgcacacaaagcagtatacgcgtgacccttgaatagcacaggtttgaactgcctgtgtccacttacatgtggattttcttccacttctgctacccccaagacagcaagaccaacccctcttcttcctcctccccctcagcctactcaacatgaagatgacaaggatgaagacttttatgataatccaattccaaggaactaatgaaaagtatattttctcttccttatgattttctttatctctagcttacattattctaagaatatggtacataatacacatcacacgcaaaataaatgttaattgactgtttatattatgggtaaggcttccactcaacagtaggctgtcagtagttaagttttgggagtcaaaagttatacacagattttcaactgtgcaggcaatcagttcccctgaccccctcattgttcacgggtcaactgtatatacacaaaagtattatatgaacctcattagaatagctgtctatagggagaagagaatgagagtgggataaaacggaatgaacaaataaaccaacaaatgcattaacaagcaaaacaacagaggggcttgcatgggccagtgatgataaagggctaagaatgagaatataattaattcaattcctcacacctgaggtctaaaaccaaggaaagggagggccaggcgtggaggctcacgcctgtaatcccagcactttgggaggctgaggcgggcggatcacaagattaggagtttgagatcagcctggccaacacagtgaaagcccatctctacaaaaaatacaagaattacccaggtgtggtggcacatgcctgtagttagctactctggaggctgaggcaggagaatcacttgaacccaggaggcggaggttgcagggagccgagatcacaccattgcactccagcctgggtgacagagtaagactctgtctcaaaaaaataaaaaaaataaaaaaacagagaaagggaggaaactagatccaggctgactagatacagcctttagagttagaaaagatgatttgacaatctaagcccacactcagattgaatgaaattgaaaagcctttcaaactaaaacatttaattacaccatctgctgcagacagaactcagacaactcaaacaggtaatgtcagcgtggtgttttatatcaccaccctcaacacagaataaaaatcagctgcatgtgaagcagtgactagaatgaagaaaaggctgcttcttacttccttctagtggttctttccgaaaacattaataggcaccagctctatgcatgtcaccctgcagggagacatggggtatataactatgacttactgttcattcctcaaggaattcccaatcttgtggaagattatacacaatgaggcaacaaaaactatccaataaaaccacggaaaagaagccagtgacaaagaagccagtgatgaaaggccctgtgagcagagctgatggccatttggggaagaaagaccaacatggatgggggtgatcagggtggctccgtgggaaagctggaagagaagtggcagatctctgagctggatgatgggccactaccatctgtatatggctaattaaagaccatgtgtggattttttattcagctctttcgtgtcattcctgctatcagcacagaacccaatctcaactttccagctatattgagctaaacttctcacctcatggaatttgcagataaagttcaaaaggatccttgccttttcaaaataattttgaatggttgagtagtccctctgtgctctctcactgacaccctctcaaggctgctgagcacgtgccatgctatggctttctccaacatcaggaaatgttctccactcagtttcaccttaatacaaatgtgttctctcttcagagaaggcaaaaaaattcatgaccatctgactgggagaagtcatttctaggtaaagtgtccatctttttctgaggaacacaggaggaaaatcttacagaaaagagttaacacagcaggcctaagactgctttttaaaataaataaataaataaataaataaataaataaataaataaataaataaataaatgaatgatagggtcttctgtattggccaggctagtctcaaattcctggcttcaagagatcctcccaccttggtctcccacagtgttgggattatagacatgagccattgtgcttggcccaagactgttattcttaaaaagtctcataaaaagcatggttaatccttggctggcacctgggaacttagatttcagaagggttcccaccatccaacctggaaagagggactcactgtgcctaaattattgtgtggtttatgctgaactcctgcttttcttcaggtagcgtggaatgtggtatgtgctgggcaaagggggcctgcatgaccagcccccaataaaaaccctgggtgttgggtctctagtgagtttccctggtagacagcatttcacatgcgttgtcacagctccttcctcggggagttaagcacatacatcctgtgtgactgcactgggagaggatgcttggaagcttgtgcctggcttcctttggacttggccccatgcacctttccctttgctgattgtgctttgtatcctttcactgtaataaattacagccgtgagtacaccacatgctgagtcttccaagtgaaccaccagatctgagcatggtcctgggggcccccaacacagaaataaattataaaagaccaaggactgggcatggtggcccatgccggtaatctcagcgctttgggaggccgaggcaggaggaccagttaagcccaaaagttcaaagttacagtgacctatgactgcgccaatgcactctaacctgggagacagagcaagaccctgtccccaaaacaataaactaaacacatacttctgccttccaagtgtcttaaaattcaatggaatggtagaaacatttttaaaacactaaatcaaaagaaacctggaaaacaagagtgccgatggccaactaaaatgtctaggaaatttctgaaaagtaaaaagtactcagaaccagattacctgagcaaaccatagcccaatacaagcttgggaggaggctgttatgcagaaggaaatggtaacaggtttccaggaacagacttgtaacagcagatagaacagcagaggtagaacctgacaaggtgattacctggggaactgcagtctgaatgaccaggactgttggacccttcccctcacatggaatacacacgccactcagcagcacaccacagctcttcaacaatcacaggaggcacgctacgcctagtaagacaggaaaaaaggaattctcaaacttcgaagatgaacacataaagaatcaccaagtttttattcagtatgatgaaacagggacactgaatcaacagaacacaaacccaagcaaagataattactagagcacatagaagaaattattagatattcttgggaagacctaaggggacattataaagagcaagcagttggtatgtgacgatctttgtgatataccaagaaataaaaacacaggatgaagaccagatagagaataatgctactatttgtgcaaaaaaggagaaatggagaatctgattcatatttgcttgtatttgcatgaagaaactttggaaggtacataagtaactaacaacaatggttacctacttgtaaggcgagagaagtaagaggacaggaatggtgggaacaccttttgtgtccggaattggtgggttcttggtctgacttggagaatgaagccgtggaccctcgcggtgagcgtaacagttcttaaaggcggtgtgtctggagtttgttccttctgatgtttggatgtgttcggagtttcttccttctggtgggttcgtagtctcgctgactcaggagtgaagctgcagaccttcgcggcgagtgttacagctcttaagggggcgcatctagagttgttcgttcctcctggtgagttcgtggtctcgctagcttcaggagtgaagctgcagaccttcgaggtgtgtgttgcagctcatatagacagtgcagacccaaagagtgagcagtaataagaacgcattccaaacatcaaaaggacaaaccttcagcagcgcggaatgcgaccgcagcacgttaccactcttggctcgggcagcctgcttttattctcttatctggccacacccatatcctgctgattggtccattttacagagagccgactgctccattttacagagaaccgattggtccatttttcagagagctgattggtccattttgacagagtgctgattggtgcgtttacaatccctgagctagacacagggtgctgactggtgtatttacaatcccttagctagacataaaggttctcaagtccccaccagactcaggagcccagctggcttcacccagtggatccggcatcagtgccacaggtggagctgcctgccagtcccgcgccctgcgcccgcactcctcagccctctggtggtcgatgggactgggcgccgtggagcagggggtggtgctgtcagggaggctcgggccgcacaggagcccaggaggtgggggtggctcaggcatggcgggccgcaggtcatgagcgctgccccgcagggaggcagctaaggcccagcgagaaatcgggcacagcagctgctggcccaggtgctaagcccctcactgcctggggccgttggggccggctggccggccgctcccagtgcggggcccgccaagcccacgcccaccgggaactcacgctggcccgcaagcaccgcgtacagccccggttcccgcccgcgcctctccctccacacctccctgcaaagctgagggagctggctccagccttggccagcccagaaaggggctcccacagtgcagcggtgggctgaagggctcctcaagcgcggccagagtgggcactaaggctgaggaggcaccgagagcgagcgaggactgccagcacgctgtcacctctcactttcatttatgcctttttaatacagtctggttttgaacactgattatcttacctattttttttttttttttttgagatggagtcgctctctgtcgcccagactggagtgcagtggtgccatcctggctcactgcaagctccgcctcccgggttcacaccattctcctgcctcaacctcctgagtagctgggactacaggcaatcgccaccacgcccagctaattttttattttattttttttttagtagaagcggagtttcaccatgttagccagatggtctcaatctcctgacctcgtgatccatccgcctcggcctcccaaagtgctgggattacagacgtgagccactgcgccctgcctatcttacctatttcaaaagttaaactttaagaagtagaaacccgtggccaggcgtggtggctcacgcctgtaaccccagcactttgggaggccgaggcgggcggatcacgaggtcaggagatcgagatcatcctggttaacacagtgaaaccccgtcgctactaaaaatacaaaaaattagccgggcgtggtggtgggcaccggcagtcctcgctactggggaggctgaggcaggagaatggcgtgaacctgggaggcagagcttgcagtgagccgagatagtgccattgccttccagcctgggcgacagagcgagactccacctcaaaaaaaaaaaaaaaaaatagagacccggaaagttaaaaatatgataatcaatatttaaaaacactcaagagatgggctaaagagttgacggaacaaatctaaatattagattggtgacctgcaaaaccagcccaaggaacatcccagaatgcagcccataaagataaagagagcatttccgctgggcacagtggtatggcaggggaattgcctgagtccaagagttgcaggtcacattgaaccacaccattgcactccaggcctgggcaacacagcaatactctgtctcaaaaaaaaaaaaaattaaattaaaaaagacagaatatttgagagaaaaaaatgcttatttcaagaaacatgaaagataaatcaagatattctaattcccaagtaagaataattccagaagcagaaaatagaatagaggcaaggaaacactcaaaacttctccagtgccatagaaatgtgtattaatctttagaatgaaacggactaccaaatgctgagcaggaagaacaaaagagatccactcttaagccagtgtggtgcccaagcgcagtggctcatgcctgtaatcccagcactttgggaggccgaggcaggtggatcacctgaggtcaggagtttgagatcagtcaggccaacatggtgaaaccctgtctgtactaaaaatacaaacattagctgggtatggtggtgcacatctgtaatcccaactacttgggaggctaaggcaggagaatcacttgaaaccaggaggtggaggttgtagtgagccgagatcatgccacactcccagcctgggtgacagagcaagattccatctcaaaaaaaaaatccactcctagacaaataatagttaaattttagaacaccaaggagaaagaaaaaaaattgtaaagcttcagagaaaataaacattaactacaaagaaacgagagtcagacgcgtgcacttcttcctagataccagcagataaagcaatatctccaaaattcagaaggttttaacgtagaatcctatacccagtcaagaatattcacatggaaaagtgaaataaaaaacattgtttaaacatgcaagggttcagaaagtttaccattcacagaatccctgaaaacaaaaccaaataatcacttaaggactcattaagaaaacaaatgaaataaaagcaccaatgatgagtaaataatcagaaaaatttacagtttacctaaataactgtttatgcataatgtatgaaaacccaaaaatttaatatgggacagaattaaaatcatgataagattcttttttgctttactcatggagagttcacataaacagattatcttttaatagcaagagaaaaaaatgtttagatatgtgtgaaaaactaagggtaccaaaacagtgcaaattcatttatcatcaggaaaatccaaattaaaaccacagtatccaccagaataactaaaaggtaaaagacagaaattaccaagagttggcaagaatgtggagcaaccacatatacttctggggtaaataagttggtgcaaccggtactgaaaactgtttgctagtatctactaaaaccgagcacatgcacagactacaaccaagcagttccactcccagatacacactcaacagaaatgcacacactcactcaacaaaagacgtgtactagagtgttcatgtacttactattcataatagtccaaaaatgcaaacaaccaactgccaatcaaagtcaaatgtatatctatattagggatatatacaatggcatatacacagcaatgagaatgaaatgaaccagctcggcacagtggttcatgcctgtaatctcagcactttgggcgggtaaggcaggcagatcacttgaggtcagaaatttgagactagcctggccaacacggttaaaacctgtccccactaaaaacacaaaaattagccgggcatagtggttgcaggcctgtaattccagctactcgggaggctgggttgggagaatcgtttgaacccgaaagccggaggtcgcagtgagcggagatcgtgccactgcactccagcctggacgatagagcaagactccgtctcaaaaaaggaaatcaaaaatataaaataagatgacaggaataatccgcaaaagatcagtaatcaaaataaatataaatgggctaaagctacctattaaaagacaaagatttcacacccataaggatagctactatcaaaaaaagagagagaataacagatgttagcaaggatgtatggaaactgaaattctcacgcattgctggtgagaatataaaatggttcagcctctgcggaaaacactatgctgggtcatcaaaaaattaaaaatagaagtactacttgatccaacaattctacttctgggtatatacccaaataactgaaagcagggtcttgaagagatatttgtacacccatgatcatggcagcattattcataatagctatgatgtggaaccaacataaatatcctttgataaatatatggataagcaaaatgtggtgtatacattcaatggaatattaattagcaataaaaatgaagaaaattctgacacatgctacaacatggatgaaccttgagggcattacattaaatgaaataagccagttataaaaagacaaatactatatgaggtactatattagatactcatgcaaggtacctaaaataggcaaattcatagagacaaaaagcagaatggtggttgccaggggctgcggtaatggatacagagcttcaattttgtaagatgaaaaaattctggagattggttgcataacaatgtgcacacacttaacactggggaactgtaaacttaaaagtagtaaatggtaaaaataaaaataataaataataaattttatgttattttaccacaatatttattaaaagacaaagattaactaattaaacaaaatccagccataagctaatggtaagagtaacaattaaagaagacacagaaaattgaaaatcagtgactagaaaaagatattccatataaatgctaacaaaaagcaagtacagcaatataaagagaatgaacaaaaaaaaaattaaataagatggctcgtttattcccaaaaggtacaattcaccaagaagatacaagaattgtgaacctttaagcacataaaacagcttcaaaaatacaacatttaaagaaaaatatatattaaacatagaaatagtacaaaaacccctacaagaatcataatgggagtcttcaatacaactctccatatcaacaggtcaaacagagaaaaaaaataagttaaggatgcagaaaacctgaattaccatcaataaacttgagattaatatagaactgtatacccaatatactaagagttcagggaacagtcgtgactgacagtggactgcaaattaatctgttcttaatctttgtttttctttcagcactgtggcagaatagagatcctaaaaaccttccagctacaaaacatctttttaaaaatataaaaaaatacaaaaataactctgaaatcaatagaagacacatggtgaaaccaaaattctagaatacagggagaataaaggcattttcagatattacaaaaacagaaaattgatcattgctgaagtaatttctaaagaatgtacttgagggagaagaaaaatgttccaaagaaaagtatctgtgatacaagaaggaatggaaagtgaagaaatggtaaacaggtagataaagctaataaatgttgacctagaaaataacaaaaacaatagcaataatgtctcgttggaagggttgaagtaaaaatacaattaaggccaaatgtgaggtaagtggaatgaaagaattagaagtccttgccttgttcacaggactgattaaataaatgagccaggttttccattcaaacagttaaaacttgaacaaaataaactcaaattaagtagaaagataaaaaacagaaattaatgtcatagaaaaataaaaaatcaatagaattaatcaataaatcctggttaataaaagctggttctttgaaaggattaataaaataatcattaagcaagtctgatcaaaaaaaaagagaaaaggtaccaaaaaaagtactgtatcagaaagagaacatacagatacatacagatatgtaagagtctgttttcttacaccagaatactatatacaacattatgctagcatatattaaatttcaataatgttaatgattttctaggaaaacagaaaatattaaatttactttgaagaaacagaaaaactgagaaaaataaatgatcatgaaaaaaatgaaaaggtaattaaatactgatattaactgcctaaacaacaccagcagcagcccaggcagtctgcagtcaagttctgccaaacttgagggaacagataattcttctattccagagcatagaaaatgatggaaagtttcccaatttaatcagagaggacagcctgatccttgttatgaacacagataaaaatggggtaaactatatgccaaactcagataccaaaaccctaaataagatgctagcttattgatgtgaacaatccaaaagtgcattttaaattagcccagggttttagagaaagaaaatctagcaatgtgaccaccacttatgttaacaattttaagacgaaaatctacatgatcatatcaatgcatgctacacaaaagcatttgggcaaaaaacccaacacccacccttgactttttaaactcttagtaattaggcataaacagaaatgtacttaatgtgatagaatacactcggtgaagatacagagggaatgctccctaaaaccaagcccaagacaaagattcctatttaacctcaatagtcaacactgcagcgagagtaatctatggaagacaaggaaaaaagtaaaaacatgagagacatctgttgtttaacagacaataagatcacctacttggaagaggcaaacgaatcaagcgaaaaactattaaaactgagacaggctttagtatggaggctcagcttcagctgtagtttgggctaccaaattcaactcgcttgcttggagagttaatcctgcaaagctaatttctgttgaggtattaggattgacaagcctgtgctcctccctcctcccccatcttcaacactgaaataacacggtgtttggaactggataacagaatcttccaaaaacaaaaattgtcctgaagggctgacttgtgcccttactcaaaaaacactttatctgctgcctgcagctcctacagttgctggtggataagcctgccaaccagctcggcgtaattcttcctgcagagggcaaggaagagcactttcacaggaaaatttttttccgaactgtatgccgcttattacataaacttacgtgctggcaaatggagctccagcaaaataagatattcagagtcaaacttccttaggaaaaaaaaaaaaaaaaagcaagcacataacactaatttccttgcatgggcactggggaaggaggtcgttacttccgcacgcccgcaggtccgcaccaccgggaaacccacgggcaccgcgcgctgcccccgggccttccaggtgcactgcgccgcggcgccccagctgacccgggatgcgcagccctagcccttcccctgtcaccccggccaggaaggggcgggagcgcggcggacgccgagggcgaagggcttctcggtcctctgcaccacgcagcacccccaaggcacaacagggagggtgcgggaggctcccgagacccaggagccggggccgggcgtgcccgcgcacctgtcccactgcggcgagggctggggtcgcctccagggccgcagctgtcgggagccacctggctctcagtcccgggtccctgcgacaaccctcgggcccggaggggaggaggcggccacctgccgctgccacctgcggcaccggtcccaccgctccgggccgggcaggacaggccaggacgtccctcctgggctggggacaggacacgcgacgaggggaccggggcccccgcggcgaagacgcagcacgccttcccagaaaggcagtcccgtgcccccacgacggactgccggacccccgcgctcgcccgcccatcccttcagaccacgcggctgaggcgcaaagagccggccggcgggcgggctggcggcgcggctagtactcaccggccccgctggctcagcgccgccgcaacccccagcggccacggctccgggcgctcactgatgctcaggagagggacccgcgctccgccggcgcctccagccatcgccgccagggggcgagcgcgagccgcgcggggctcgctgggagatgtagtacccggaccgccgcctgcgccgtcctccttcagccggcggccgggggccccctctctcccagctctcagtgtctcatctccctatctgctcatcctctggtcgcacataatcgatgtttgggcgtcccaagccagatgtggaccccatttccgcactctacactggaggttttctaagggtggtgcccggaccagcagcttcagcctcatctgggaacttgagaaaatgcagattctccgtcccacccagcctattcggtttttcctgcactaaaaccatgaaggtggggcccagcagtccacattctcgcaagcccgtcaagtgattctgaggcgccctccagtttgagagctatgctcacggcctcacctccgccccgcaaggagcccggtcttgcctgtggcgctagccgcacacggacacctcatcctgcggggcccgcccccccgctgcaccctcaccgcccaacgcctcctccgggatgcagcggaggcgcctggaagtcggcaaggtcaacatccccctcagcatcttccctaccctcacggctcctcctccaggggtgcctcatggccaggggttagaaagagccactgtgtttcttgacatggaagtggcctaagaccttaatgaaaactgcaggagtggaatgacagaacctttggtcatacttgagggcgtgaagctcaaatgaggaggaaggaaaggatccagggagaataaccaaccctggcaagttgtggcgcccaggtagaggggcgagcctaggctagcggttctcgaccagggccggtgttgcccctcctcgccgccccgcgtacatttggggaggtctggagacatttttggttgtcatgatgcgggagttgctactgttgcctaagtgggtagacacgagggtgctcctcaacatcctacctgaaggacaggactgccccacaaggaagaatgatccggccccaaataagaaaccctgggctggtcagcaacaacccctttgttctgagaagagaggaggaaagaataaaagaagtggggtgaagttttggtttggtagaggaaacttgaagacattttcactggaaaggaagagaggaagaggagggagatgtctgtaaggacgagcaaaccgggtgacagctgatttcctcatattgaagtaatgagtcctagttataataaattcctaataaaaacccagtttatccctgcaataaacttgtcttttttttttaaatatactgcttgattctgtttgctaatattttatttacaggctttgcattgatatgcaaaaatgagatgggcaataattttctttttgaatgtctaatgttgtttggtttcagaatcaatgttatgctcacatcataaaaaatttggaaccgaggcaggaggagtgcttgaggccagaagttcgagaccagtctaggaaacacagtgagacccccccatctctacaaaaaaaaaaaaagaaaaaaaaatgggcatgtttgctttttccttttactctgaacaatttaaggagcattaaaattatctattctttgaggtttgatcatttcccagttaaaaatgttcctcccagcctgatgctttctttggggagggtaaatcttttaaggctagaaaagtttcttctgtggcaattttattatttacattttaaaaattattctagagttaattttgataaagcatgtatttcttaaaacaaattatcctttttttccagatgttcaagtgtatttgcataaagttgaggaaagtagtcttttgtgaatcttttaacttctcccaaatatcttattttgtgtatttttgcttctttattttgttaacttttaaaagtgtatttttttttcaaagaatcagctcttaggtttatgtttttggttatactggagcttttttcttcttctttttaaaatattttttctcctttattttttagacgtattttgatctaacgtaatcggaagaaggtaaattagaatcttttgttactattgtgtttttatttctccttatttctctgaagtcctgctttataaatagtaccatgttatttgtgcataaatattcatttgtcttatattcttgggaattttcccacttcatcataaaatgaccttccttgtctcatttaatgtgttcaaactttgccctgaatttaactttgtctgatattttaccatcctgctgaattttgtttgttaccccaaacaacctttgctgttttcgtcttttctgaaccctttattttaggtaatcccttgaattagagcactaagttttgctttgtgattaaatctgaaaatctttatcttgccatagatgagttgagccctattcatgtgacagctatattatgctgtttcatagcccttttggtccttttttcactcttgcattgcatattttgtgtttattgtgttttgtgtttcttctgataatttggaaggtttgtatttttattcagggagttgccttataatcatactccgcaatacacatcgtcctcagtttcttcagactgtctgttaactccctattctgaataaaaatgacattgtaatttccctcttttttctttaccccttttcttctcctcacctaatgtaaatgattttatccttctttagtatttgcttttttaattaactacatttataaatatctttatcacttgatttttaaatcagctttgaatgagatatttggattcctagatataaaagatgttaattataccatttccacgttagtaggtttataaaatcatacattctgctgtgtaaccataatcccacgtttgttttagttccactcctacagttaaaagattcagaagtattattaacagttattttgccatagttttttccccaacccattttgtggtaagttatgatcctgctttagtttcttaagaataatttatagagcagagtgtggtggctcacgtttgtaatcccagcactttgggagacaagaggtagaaggatcgcttgaagccagcagttcaagaccaccctgagcaacatagtgagaccttgtctctacaaaaaattttaaaatttagccagacgtagtggcgtgtgcctatagtcccagctactcaggaggctgaggcaagaggattgctagagcccagaagtttgaggctgcagtgacctctgattgtgccactgcaccccagtctgggcaagaaagtgagaacctatctctttaaaataacaataataacttatgaaaattatattccctgagtttttcatgtttaaaaatatttgttgcctttatcctgtaaaagtttgagtataaattcttgggttatactttatttattgaagaatgtataagtattgtcttctagaattgagtgttgctgtaatgaaaccagaagtcagcctggtttatttttcctcagaaatgaggtaattgccggccggacaccgtggctcatgcctgtaatcccaacactttgggaggccgagacaggtggatcacgaggtcaggagattgagaccatcctggctaacatggtgaaaccccggctctactaaaagtacaaaaagttagctgggcatggtggtggacgcctgtaatcccagctacccgggaggctgaggcaggagaatggcgtgaacctgggaggaggagcttgcagagagctgagatcgcgccactgcactccagcctgggcgacagagtgagactccgtctcaaaaaaacaaaaaaaaaacaaagaagtgaagtaattgccatgatgctccaagaattatctctttgtctatgaaatccagaaatctcactgttatacattttggaattattattctgggccaatatttcctgggacacaatagattgactctatagatttaattttttttttttttttgagacagagtctcactgcaatctcagcttactgcaacctctgcctcacgggttcaagcaattctcctgcctcagcctcccaagtagctgggactacaggcgcgtggcaccatgcctggctaatttttgtctttttagtagagacagggtttcaccatgttggccaggctggtcttgaacgcctaacctcaagtgatccacctgcctcagcctcccaaagtgctgggattacaggcgtgagccaccatgcccagcctcaattcctctttctatctggtaatttttctgaagttgaaaacatttgttctaatacgttatttcagtgttcttctaagatgtgtaaagcaccctattcccaggtcagcccccatcttgctagtgagctcggctggttcttcacaagagctctggttttctcctgcttaatctcaagtacctctgtcagcctccacctggtttatgatttggagttttttggtttttgttttttgtttttgacagagtcttactctgtcacccaggctggagagcagtggcataatctcagctcactgcaacctctgtctcccaggtttgagcgattctcctgcctcagcctactgagtagctgggattacaggcgcgtgccaccacacccggctaatttttgtatttttagtagagatggggtttcaccatgttggccagggtggtcttgaactcctgacctcaggtaatccacctgcctcagcctcccaaagtgctgagattacaggcgtgagccaccgcgcctggcatggtttggagttttaatctgtagttttaataaagatagtgcttatgtttgtgtttcttatatttcttggtactcttgggtaatttgtaagatccccatatctacacaagaagtccattttcaattcttttcttcagactgtttattttattttattttattttatttttatgtttgagatggagtctcgctgtgtcacttctggaggctggagtgcagtggcgcgatctcaggtcactgcaacctccgtctcccgggttcaagcaattctcctgcctcagcctcccgagtagctgggattacaggcacctgccactttttaatttttttagagacagagtctcgctttgttgaccaggctggagtgcggtggtgcaatcatggctgactataacctccaaatcctgggctcaagtgatcctcctgcctcagcctcctgagtagctgggactacaggcacatgccaccatgcccagttaattttaatttttttgtagagacagggtctccatatgttgcccaggctggcctcctactcctggcctcaagtaatcctcctacctcagcctcccaaattactaggattataagcatgagccaccatgcccagccttgttctactactttaatttcatatgttaggtgaccatgtaattgatcatccaaaccaggatactgtaagaatgaaagaggctgacagtagtatgatgctgggactagcattgtgcactgagattatttctgggaaagcaggagatacggtcaccctacttatagtgtgcttgtctttggattgttgaatttggagtttctatttgcaggcttatttcaactgggcagccttgatccgccctgcccagcaatgctaccgttctctccaccgggtctctgggaccccttcagtcactatacttagctcagttccccaccctcccactccctaaaagcgtaaccaggaatcctgcctcaggtctactgccgtcttccgtgggctgtttcagttcctattacccagagtcaaactcccagcattccctacctgattccagacttggagtccagagctttaacctcttcaggccaactccccactttgcatttctgtccctatatcttagtccatggagatacatttcatgtctttgagtctacttacaaagtaaattttgctgttttttaattttttttttgagatggagtcttgccctgtcacccaggctgtggtgcaatgacgccatctcggctcactgcaacctccgcctcctgggttcaagcgattcatctgcctcagcctcccaagtagctgtgattacagacaggcaccaccacgcccagctaattttttttatcttttagtagagacagggtttcaccatgttggccaggctggtcttgaattcctgacctcgtgatctgcccatctcggcctcccaaagtgctgagattacaggcgtgagccactgtgcccagccaattttgctttttttatatttcattgctatatgtttagaggataagtttacagtgctatatgcattcccaaatattagaccaaaaaaatctccaaaaaattagaaagaaaatccaaaaaatctcaaaaaataccaaaaagcaacaatctcacagaccatactcactgacccccaataaaataaaattagaaattaaccacaacttaacaaaataaagtactcaagtcagagaggaaagaggaaataaacatcaaaattacaaagtctaggcggtggctcacgcctgtaatcccagcactttgggaggccaaggcgggcagatcacaaggtcaggaattcgagaccagcctggccaatatggtgaaaccccgtttccactaaaaatacaaaaattagccaggcatagtgatgtgtgcctgtaatccagccacttgggaggctgaggcaggagaatcactgaacccagggagacgaagattgcagtgagccaaaatcgtgccactgcacttcggcctgggtgacaaagcgagactccatctcaaaaaaaaaaaaattacaaactctttagatagaaattttggtgtttttttttgagacggagtctcactctgtcgcagaggctggagtgcagtgggactatgtcagctcaccgcaacctccatctcctggattcaagcaattctcctgtctcagcctcccaagtagctaggattacaggcgcccaccaccagacccagctagtttttatatttttagtagagatggtgtttcaccatgttggccaggctggtctcaaactcctgacctcaagtgatccacctgcttcagcctcccaaagtgctcagattacaggcgtgagccaccgcaccccacctagatagaaatttcaacatgaggccgggcacaatggctcacgcctgtaatctcagcacttcaggaggctgaggcgtgggaggatcacttgggcccaggagttcaggaccagcatgggtgacagagacagaccctgtctctatttatttgaaaaaaaaaaaaaaaaagagagagagaaagaaatttcaacatgaaaagtatctctcaaacccttcgagatgttggcaaaaagcgactcaaaggaaaatgtattactgtgtgtgaatttgcttgaaaataagaaagaggccgggtgtggtggctaacacctgtaatcccaacactctgggagtccgaatcaagtggatcatgaggtcaggagatcgagaccatcctggctaacatggtgaaaccctgtctctactaaaaatacaaaaaattagctaggcgcggtggctcatgcctgtaatcccagcactttgggaggctgaggcaggtggatcacctgaggtcaggggtttgagaccagcctggcctacatggtgaaacctcgtctcttctacaaatacaaaaattagctgggcgtggtggtgggtgcctgtaatcccagctactcagaggctgaggcaggagaatcgcttgaacccgggaggcggaggttgcggtgagccgagatcgcaccactacactccagcctgggcaacagcctgggtgacacagtgagactccatctcaaaaaatacaaaaaattagctgggtgtggtggcctgcgcctgtagtcccagctacccgggaggctgaggcaggagaatggagtgaacctgggaggaggagcttgcagtgagccgagatcccaccactgcactccagcctgggcgacagagcaagactcttgtctcaaaaaaaagaaaaaaaaaggaaaaaagaaccctgataataaagaaaccaaatgttcaactctcaaagctcggacactttaaagaaataattaataaaggcagaagttaaagggaggatgataaagcaattttttttgttggtttttttgagatggagtcttgctctgtcacccaggctggagtgcagtgatgcgatcttggctcactgcaacctctgcctcccgggttcaagcaattctcctgcctcagcctcctgagtagctggtactacaggtgcgcgccacctggcccagctaatttttgtatttttattagagacggggtttcaccatatttgttaggctggtctcaaactcctgatctcaggtaatctgcccacctcggcctctcaaagtgctgggattacaggcaggcgccaccgcgcctggcctaaagcaaaatattggttctgtgcaaaaggtcaataaaaagagcaaacgtttacaaactggagccagcacccattcagctcagtgtgtctggagaaaaaacaatctcgcttcagaattcatgattacgcagccctttttgcttcctaaaaatcctactatgttgctgttgaccattctctctctttctctctctcttgctttctctccagaaaagctattcagacattctcctctttcctcaaacctccaacacttcctcctccatccttagcctcagctgctgacctcacttctaatcattgagaaaccaggagaagcatttaagagtgaacctccgcctccccgcacgggcaaaaccacccacccacagaattgtgccccaattctgcgtcctctcctctcaccatggatggacggtccaggctccgagccaaagccaggcctcccctggagctctggatccaccacctgcagcttctcaggcagggccccagcagctcccctgctcccttgtaccatcaatccctcccctcactgggtcactcccaacaatatatatatttagtgatgtttctcccatgtggtaaaatcacttagcctctctcctcccccagctactatcctatttgtttctttccattctctgcaaaacttctcaaagcattgtgtctatgtgctgactccatttatcttctcccgttctctgctgagtccttcccacagactctcaccccagttactccatgaaatgacctctgcactgccacatccaatggtgaatgttcagttcttaattttattcagtctttcagcagcatttgacctggccgatcactccctcttcttaaaaatacttttctcagccaggcgtgatggctcacacctgtaatcccaacactttgggaggccaaggcgggaggatcatgagagcccaggagttcaagatcagcctgggcaacatggcaagaccctatctctacaaaaactaaaaagtagccagtgtgatggcatgcacctgtagtcccatctacttaggaggctgaggcagtaggatgacttgagcctgggaaatcaaggctgcagtgagccatgattgcaccactgcactccagcctgagtgacagcgagaccctgtctcaaaaagacaaaataggaaacttttctcagcatattcctctgattctcctgctgcttctgtctgcacagattcagtctcctttgccggttcttcctcatcctcctgatctcttgaccttgaagtgccccagagtacagtctttttttttttttttgagacgcagtctcgtctgtcacccaagctggagtgcaatggcgaggtctcagctcatgcaacctctgcctcctgggttcaagcgattctcctgcctcagcctcccaagtagccaggactacaggcacatgccaccatgcccagcaaattgttgtatttttagtagagacagggttttactatattggccacgctggtctcaaactcctgaactcgtgaaccacccgcctcggcctcccaaagtgctgagattacaggcatgagccaccacacccggcccagagtacagtctttagacggcctctctacctatacttgctcccctcataaactcctcctgcctcatggctttaaataccatcggtagactgatgactcccatatttctcttttttttttggagacggagtctcgctcagtcccccaggctggagtgcagtggcgcgatctcggctcactgcaagctccacctgccaagttcacaccattctcctacctcagcctctccagtagctgggactacaggcacccgccaccacgcctggctaatttttttgtatttttagtagagatggggtttcaccatgttagccaggatggtctcgatctcctgacctcgtgatccgcccatctcggcctcccaaagtgctgggattataggtgtgagccaccgtgcccagccgatgactcccatatttctatctcttgctgtgtgggagttctcctcagaactccatactcataaatccaactctcataaatagtatctcaaatgggcaatatgctcaaaagtcaattcctacttttctccctaaacttgctttcctgcagtctccaccatcttaatgtccaatctaacattaggaggcaaaaactttgaagtcattcttgactcttctctattacacaccctatccaatctttctgcagatccagtcgacccccaaatccagttagctctcatcatctcccctgttaccccctggtccaggccatcttcctctctcacctgaatcactgcagcattctcctcactggtctctttggttctgttttcactccaccttagcatagtctccacagagcagtcagagggatccttttaaagtgtaattcccatcctgtccctgctctgctcaaaaccctgtcgtgattcccgttttaatctgtcagattaaaagccagagtctttccagtgacctacatgatctgcctattatcacctcccacttctttccccttgctcactccactccagctctgcagctgtcctttctgtttcctgaacagcccagattttgcttctttagaacctttgtatttgctgtcccctctgtctggaatgtttttccaggaagtcacctggctctctcctgcacttccttcctgaccaccatgtttaaaaatcactcaaacacacttcaggccggacatggtggctcacgcctgtaatcccagcactttgggaggccaaggtgggtggatcacctgaggtcaggagttcgagaccagcctggccaacatggtgaaacttcgtctctactacaaatacaaatagtagccaggtgtagtggcacacacctgtaatctcagctactcaggaggctgaggcaggagaatcgcttgaacccagaaggcagaggaggtgcagtgagccaagatcacgccacaacaccccagcctgggtgacagagcaagaccccatctcaaaaaaaaaaaaagaaaaaaaaatcacacaaacacacttctcttcatattccttttccaagttttatttttctccagaatactttacattgttttaatggaagttctccgtttccccccaactagaatggatacttcctgcaggtaggcactctagtcctcccatccaagtactaaccaggctcaaccctgcttagcttctgagagcaggggagatcaggcctgttcagggtggtatggcccaggaattttgattctgttttattcattgctgttctgttgattctcttttgttcctcctcctagtgctgagaacactacttgtacataataagcattcaataaatatttgttgaatgaatgacttgttgaatgaattaatctcagaaatgcaggactggttctacattagaaaatttttcaaggtcattctctgttgtcgtaacacattaagagaggaaaattttgtactctaaatcatttgataaaatacatactgatttctgttttcaaaaactcttagtggctgggcgaggtggctcacatctataatcccagcattttgggaggacgaggtgggcggatcacttgaggtcaggagtttgagaccagcctggccatcatggtgaaaccctatctctactgaaaatagaaaaattagccgggtgtggtggcgcatgcctgtagtcccagctacctgggaggctgaggcaggagaatggcttgaacccgggaggcggaggttgcagtgagccaagatcatgccattgcactccagcctgggtaacagagtgagactccatctcaaaagaaaactcttagtgagtttaggaatccaaggaagaccctcaaactaaatagataatctagctaccagaagccttcagtaaaccttaacactccatggtgaaacattagaaacattcctactaaaagacaggctaagaatgcctgcaatcttcacggctagtccaagaagtcaaaaagaagaaatgagcgctgatttaaaaaaataaacaaacaaaaaactaccgatgcagaggctggcagcaaggactgaaggactgtacagtacttgcctggagcaggcggatggccacacccctgcgaagcctgctcagctggctgggggacgctccagtgtgtgagtggcaggatgcagggtacttcctctgccagggagttgcactggggagatcctcccccactcacactttggcagctggggctttggaatgtgacttagcttctgtcaaagggtcaatccaccctttgatatatgatgcaaaggcgaacatatgatgcaaaggtgagagaacagcccaaattaggacttttaccacagctgtggaggtggacagcgacagtggtgggccctggccagacttttcatgctcaaaggtggtggttgttcttcctacttcttgtccctccagggcttcctttgcctgtgtgctgaacctgcttcttttaattttttttaacttttttaaatttttaattgttttaattaaaacaaattttgaaaactgtctgaacctgcttttgaaccctgctatgatttgaatgtttgtcccctgccaaactgattttgaaacttaatctccaaagtggcaatattgagatggggctttaagcagtgactggatcatgagagctctgacctcatgagtggattaatggattaatgagttgtcatgggagtggcatcagtggctttataagaggaagaattaagacctgagctagcatggtcgccccttcaccatttgatatcttacactgcctaggggctctgcagagagtccccaccaacaagaaggctctcaccagatacagctcctcaaccttgtacttctcagcctctgtaactgtaagaaataaatgccttttctttatgaattacccagtttcagatattctgttataaacaatagaaaacgaactaaggcaaactctcatgattctactgccatgccattccaataaactccctttatgcttaagagagccagagttggccaggcgtggtgactcacgcctgtaattccagcactttgggaggccgaggcaggtggatcacaaggtcaggagatcgagaccatcctggctaacacggtgaaaccccgtctctactaaaaatacaaaaaaattagctgggcgtggtagtgggtgcctgtagtcccagctactcgggaggctgaagcaggaggagaatggcgtggacccaggaggcggagcttgcagtgagtcgagatcgtgccactgcactccagcctgggtgacagaatgagactccgtctcaaaaaaaaagagagccagagtttatttctgttgcttgcaaccaagaaatctggctggtgcactgaagtttccataaataatagcaatttaaagactctttccaagccaggcaatgcctagccttgtgtagtccttgtggtaatacattcattcattcatttgttcaaccaactgtgctccagagactaagaatacaaaaatgggggccgggtgtggtggctcacacctataatcctagcactttgggaggccgaggcaggtagatcacctgaggtcaggagttcgagaccaacctggccaaaatggtgaaacccctactctactaaaaatacaaaaaattagctgggggtggtggcggacacctgtaatcccagctactcgtgagactgaggcaggagaatcacttgaacccgggaggcagaggttgcagtgagccgagatcgcaccactgcactccagcctgggcaacaagagcgaaactccacctcgaaaaaaaaaaaaaaaaaaaaagagggccggggctgggcgcagtggctcacgcctgtaatcccagcactctgggaggccaaggcaggagaattacgaggtcagcagatcgagaccagcctgaccaacatggtgaaaccccatctctactaaaaatacaaaaattatccgggcgtggtggcgcacacctctagtcccagctacttgggaggctgaggcaggagaatcgcttgaacccgggaggcagaggttgcagtgagccgaaatcatgccactgcactccagcctgggtgacagagtgagactccgtctcaaaaaaaaaataaaaaaaaaaaaagaattcaaaaattgtagagttatagtgtgcttctagtttagttgagaggacatctgtccttcaaggaaggctagaatctataccctgagtccttactgaaatcaatccagcagtcaaaacatgggaccaacgatcacagcagtaagataggaagagcacctttgtacatttagctcatgttgagataagccactgacagagctgaaggaagctcacagttctgggttccatcctttggcatttaaaaagaaaagtgctaagaaaattcggttggtcacggtggctcacgcctgtaatcccaacactttgagaggccaaggcaggcagatcacgaggtcaggagttcgaaaccagcctggccaacatggtgaaaccccgtctctactaaaaacagaaaaattagccgggcatggtggcgcatgcctataatcccagctactcaggaggctgaggcaggagaattgcttgaacccgggagggggaggttgcagcgagtgagagcaggccactgcactccagcctgggagacagagcaagactctgtctcaaaaaaaaaaaagaaaaaaagaaagaaaggaaaaaaagaaagaaaaaaaaagaaaaaagaaaattcaggccaggccaggcctggtggctcacacctgtaatcccaacactttgggaggctgaagcgagacggtgccttagcccaggagtttgagaccagcctgagcaacatagcgagaccctgtctctataaaaaaaaatttttttttggccagacgcagtggctcacgcctgtaatcccagcactttgggaggccgaggcaggtggatcacgaggtcaggagatggagaccatcctggctaacacggtgaaaccccatctctactaaaaaatacaaaaaattaaccgggcgtggtggcgggcgcctgtagtcccagctactcgggaggctgaggcaggagaatggcgtgaacccgggaggcggagcttgcagtgagccgagattgcgccactgcactccagactgggagagagtgagactccgtctcaaaaaaaaaaaaaaaaaaaaaaaattaattgtcaggtgtgctggcatgcagctgtagtcctagctactcgggaggctgaggtaagaagatcgcttgagcccaggagttcaaggctgcagtaatagtgcctctcactctaccctgggtgacaatgagaccctctctcaaaaagaaagaaaaaagggaaagaagaaaagaaagaaagaaagagaagaaaggaaggaagaaagaaagaaaaagaaaaggaaggaaggaagaagaaaaaaaaagaaagaaagaaaagagagagaagttcaaagaccaaagggtcaggatcccaaaatagtttttatgttttatttatttatttacttatttatttttgagacagtatggctctgtcgcccaggctggagtgcagtgatgcgattgcggctcactgcagcctccaaactgggctcaggtggccctcccacctcagcctcccgagtagctgggaccacaggcgcgtgccaccatgcccagctaattttttaattctttgtagagatgaggtctctatatgctgcccaggctggtctcgagctcctgggcttaagccatccacccgcctgggcctcccaaagtgctgggattacagaagtgagccaccgcgcctaatcgggtggtttgtttgtttattgacggggtctcgctgctgcccaggctggagtgccagtggctgttcacaggtgcagtcctggagcattgcatcagctcttgggctctagcgatcctccagagtagctgcagctgggattccaggcgcgccaccgcgcggggctcagaatgggtttttatattgagggttatgctgccacctagaggatatatgtagtaccgaactgtgtgcgcagggaggctgaggttgcagtgagccaagatgatgccagggcactccagcgtgggtgacagagcaagatttcatctcaaaaaaaaaaaaaaaaaaaaaaaaaaaagaattgaaagtaaggtcttgaagagatatttgtgcctgtatggtcatagcagtattaactttgacccactagctaaaacacaaaagcaacatgtgtctgtcagcaggtgaacggataaacaaaatgtggtatatatgtacaattgaatattattcagcctttaaaaaggaataaaaggctggatgcgggggctcacgcctgtaatcctaacactttgggagactgaggtgggtggatcacccgaggttaggagtttgagaacagcctggccaacatggtgaaacttcatctctactaaaaatactaaaattagccgggcatggtggcacttgtctgtaatccaagctactggggaggctaaggcaggagaattgcttgaactcaggagccggaggttgcagtgagctaagatggcaccactgcactccagcctgggcaacagagtgagactccatctcaaaacaaacaaacaaaaaattattatttccaaagaaacaagaccctgggtccatttcccagcccacacctgatgttgactcacaacacacagcctggtttgctatgagcctgcttcatttaattgtcaccttaacttcacatcaccctcaagtcctggaataactctttgctgacctttgtgtgctgagccatctccatgtcgctcaacgtgcagtccctctcactgcactgagtcaatagccagacgtggtctgactgcagggtcatccttggtggcttaggctgactcgggcatagcagggtgctctgagacctcaccgcatataggctttgcccccaataaactctatataatattcatattatgtggtctgggtgtgtgtagctttgcactgtcttctcgtgacagtgccctcaacctctttcccaggatttcctcctctacctcctcaagtcccactgctctgcaaagaccaaaagctgcagagtcccagctccctcctttacaccccacgacgcagcctcctctctcagaaccctttaaacagagtcttttactgcagatcccaagaacagccacacccctctctcccacccactccagacacacccaggtaattatagcacccagggtaactatgtagatggagtccctggaacatgtggatagtgccccctgggagtatgcaaaagcaacattgctggcacctgcagagaacagggtgacatccaggaatcagagcatgggcctctgggaggtagggatgtggccaggcaggctgccaaaaattggtagagcaaggccacaggatctttctgaccttccttccaaacagaggctcctgtactggtgatccctgtgttgattgaccactcccttcctgggggtcgtggtctctgtcccagttgcccggacttctgtgagtgtcctactgaggtccttttcatgagaagcatgctgtccttccacctgctgggagcaagagtgacaacttcaatactataatagcagtggcatacagagaagaagaaagatgaagtggcaagaaaaacaggcttccaagcaggagtttttctataaaaacaaaaacgtttacaagcaaactttttataaagggctagatagtaaatattttaggctttgagagccacatagacttgtttgcagggactcaatgtcgctattgtagtttgaaagcagccatcagggttatgtaaatgagtgagtctgattttgtttcagcaaaattttatttaccaaaacagacaatgagtgggctggatttggcccatgatccttagtttgccaactcctgctttgggctcacccagatctgattttgaattctggctctgctactggttagctgcaggagcttggaaggctctctgagcctgtttcctcatctgtaaaattaaagcaataatttctaacactcaagagtgttacctcacgcctgtaatcccagcactttggaggctgaggcaggcggatcacctgaggtcagaagttcaagaccagcgtggccaacgtggcaaaaccctgtctctactaaaaaatacaaaaagtagccgggcatggtggcgcgcatctgtaatcccagctacttgggaggctgaggcagggatactgctagaacctgggaggtggagcgtgcagtgagtggagatcacacctccacactccagcctggccgacagagcgagactccatctcaaaaaaaaaaaaaaaaagagtgttagaaggttttgagataatgaataaaagatgccttgtgtatactaagtattcaacaactgatagctgcattggtctaattataacagtttagaagcgattgagtcaacaaatgctggatttgtcagggaggacttcctatcaggaggtagatcttgggctgagtcctgaagcaaagataggcattggatagaggagttgagagaacaccctaggactgttattattattattcgacacggagtctcttgctctgtcacccaggctggagtgcagtggcgcgatctcggctcactgcaacctctgcctcccaggttcaagcgattctcctgcctcctaagtagctgagactacaggtgtgtgccaccacacccggctaatttttatatttttagtagagacagagtttcaccatgttggccatgctggtctcgaactcctgacttcaggtgatccacccgcctcagcctcccaaagtgctggaataacagatgtgagccaccgcacccagcccagaaccatttttcaatccttggctctgccttttattagctgcaagatctcaggcaatttatttaacctctccaaagactcattttctcattcacaaaatgaggcaaataataatatctactatcccaggttgtcatgagaattaaatgcaacatgacatttaatgaaatgagaagtcccttggacattaactggctaaagtatgtgctcgacaaggatatcattttaggtggatacttagcatctcagaactgatgctcacaatggaatatcattgaaacgcattaaaattcattttaaatgattgtaggtagtgaggcaattgaaagaagaagacaagaggactgattataatgcttcaggctcactagtctccttttaggagggaaaaacaatttcaagttaaattttaggctctagatttttacccctgctgctcattagaatcacccagattgatgaaatcagagcccatctgaggctgtgtttttcatctccagaatgagagctgttgtggggattaagtttttgaaaaagtacatctaacaggtgatcgaaaatgatagtgatattattgcagtgatggtcattattgttgttattattatactgaaagaggcttcagttttctgatccataaagtgagggaattgcatgagaccattgctaagattccttctagctctgtttttttgtttttgttttttagacagagtctctgtcgcccaggctggagtgcaatggcatgatcttggctcactgcaacctccgcctcccgggttcaaatgatcctcctgtctcagcctccgaagtagctgggactacaggcacacaccaccatgcccagctaacttttatatttttaatagaggtggggtttcaccatattggtcaggctggtctcaaactcctgacctcaggtgatccacccgcctcggcctcccaacatgctgggattacaggcatgagccactgtgcccaaccccttctagctttcttgatcactgattctagggttctctgctgaaatatatttgagacatcctggataaaagatcatgcaagagctcccaatatggtattaataattgattctggaggcttagctactcctgatggattagacatgactcaactgcctctcttatgtgtacaacacaacaacacaaccaagaaaggttattctggcattccatttattcagtttatttacagcccttacttccagcagcacgttaaagatatggccagggccgggtgcagtggctcaagtctgtaatcccaggactttgggaggccaaggtgggcggatcacaaggtcaggagtttgagaatctggcaattcttcagacttagaagcaaccagctcgataacacagtcttgtgtgggctctccctctgtccctccctcgcttccctcatttctcatccctgcccctgagactgtgcaccttcacatagccctgccatgagaccttcatctcaggctttgctttctggggtaactgaggctaaacactgagtggccctaaaagaggattgggatttggaagttagattattcaccagagaacagactttgctgatgatcaggcccaggttgtaattgttgaaaaaaagagaggatgcatagtcttatctcatctcctagtcaaagtcaacaccatgataaataagagtcaaatcctgagatgtgaattggggacatttgagtggttaaccctgagaagcttgcaccttcagacccctcaatacccctgctccccagagaaggctggacattgacctcagcacaggcaggagccctgcaagatgccatttgtcctactaaagatggacccctccactctgtttctaggtaaataaccaaagtcaagtctccacacagcctgagcaagaaagtcagagcctgctacaggagaaaataccacactggccaaaggattcactagccctggccactgtgtgtgggaggaaccagggaatcatgtgtgggagtcaatgttgaagctgttggactgggggtggggtggaatataagcctggccctggggagtttttcccgtttgagggcctttacccacaactcaagatccagtgctatagcaggagatcccagagctagtcctaacagatggtcaggattgaacttggcctagagtaaaatgaggaggatagtgccagaactttctcaacatactattgaggaagaggtcagaaggcttaaggaggtagtgtaactggaaaggggtcctgatccagaccccaggagagggttcttggaccttgcataagaaagagttcgagacgagtccacccagtaaagtgaaagcaattttattaaagaagaaacagaaaaatggctactccatagagcagcgacatgggctgcttaactgagtgttcttatgattatttcttgattctatgctaaacaaagggtggattatttgtgaggtttccaggaaaggggcagggatttcccagaactgatggatccccccacttttagaccatatagagtaacttcctgacgttgccatggcgtttgtaaactgtcatggccctggagggaatgtcttttagcatgttaatgtattataatgtgtataatgagcagtgaggacggccagaggtcgctttcatcaccatcttggttttggtgggttttggccggcttctttatcacatcctgttttatgagcagggtctttatgacctataacttctcctgccgacctcctatctcctcctgtgactaagaatgcagcctagcaggtctcagcctcattttaccatggagtcgctctgattccaatgcctctgacagcaggaatgttggaattgaattactatgcaagacctgagaagccattggaggacacagccttcattaggacactggcatctgtgacaggctgggtggtggtaattgtctgttggccagtgtggactgtgggagatgctactactgtaagatatgacaaggtttctcttcaaacaggctgatccgcttcttattctctaattccaagtaccaccccccgcctttcttctccttttccttctttctgattttactacatgcccaggcatgctacggccccagctcacattcctttccttatttaaaaatggactggggctgggcgcggtggctcatgcctgtaatcccagcactttgggaggccgaggcgggcggatcatgaggtcaggagatcgagaccatcctggctaacacggtgaaaccccgtctctactaaaaatgcaaaaacattagccaggcgtggttgcaggtgcctgcagtcccagcggctcaggaggctgaggcaggagaatggcgtgaacctgggaggtggaggttgcaatgagccgagattgtgccactgcactccagcctgggtgacagagcgagactccgtctcaaaaaaaaaaaaaaaaaaaaaaatagctgggcatggtggcgcgtgcctgtaataccagctactctggaggctgaggcaagagaatcgcttgaacccagtaggcggaagttgcagtgagccgagatcttgacactgcactccagcctggtgacagagtgagactctgtctcaaaaaaaaaaaaaagaaaaaaaaagacagaaagaaagagcacagacagagtcacaggtatttgcagtaggaagctgtcaggttagagtgcacggaaatagaaagtatattttacacttacagcacatcttcgtttgattagccacatttaaaatactgaatagcaacgtgtggctatttagtattcactaaaatcttggacagtgcaagtctaaagaatccttgatccgtccggcatggtggctcacgcctttaatcccagcactttgggaggccaaggtggaaggatcacttaaggtcaggagttcgagaccagcctggccaacatggtgaaacctcgtctctactaataatacaaaaaaaattagccgggcatggtggtgcatgcctgtaatcccaggtacttgggaggctgaggcaggagaatagcttgaatccaggaggcgctgcagtgagccgagatcatgccatgccactactgcactccagcctgggcaacagagtgagactgtctcaaaaaaaaaaaaaaaattgttgggcgtggtggctcacgcctgtaatcccagcactttgggaggctgaggggggtggatcacctgggttctggagttcgagaccagcctggccaacatggtgaaaccccatctctactaaaaatacaaaaattagctgggcgtggtggtgggcacctgaaatctcagctactcaggaggctgaggcaggagaatttcttgaacccaggaggcagaggttgcagtgagccaagatcgcgcctctgcactccatcctgggtggcagagcaagactatgtctcaaaaaaaaaaaaaaaaatacttgattgtctggacattctgcagaacatcatatggagacactatgttgacgacatcatgctgattgtaagcaagaaatggcaagtgttccagaaacacagtcaagacacatacatgccagaaggtgagatataaactctactaagattcagtggcctgccacactggtgacatttttaaacctgctagatgtttgtgtagaaaaggatttaaccttgcccaaagaggggtctggcctttgtccccagctactggacataatctctttaaactcttgaaatatcattcctgatagaagtatttttgttttgactaggggccttgggccagccagatagcaacaatgtgatctgggttgggggctttggatcaggtggcatcagtgtgacctcctgagtggctagagactagaatcaaccacatgggcagacaacccagcttacatgatggaattccaataaagactttggacacaagggcttgggtaagctttcctggttggcaatgctctatactgggaaacccattctgactccatagggagaggacaactggatattctcatttggtacctccctgggctttgccctatgcatttttcccttgtctgattattattattattatgagatggaatctcgctctgtcacccaggctggagtgcagtggaatgatctcaactcactgcaacctctgcctccccggttcaagcgattttcctgtctcggcctcccgagtagctgggactacagatgcataccaccacacccggctaatttttttgtatttttagtagagacggggtttcacgttagccaggatggtctcgatctcctgacctcatgttccgcctgcctcggcctctcaaagtgctaggaatacatgtgtgagccaccgcgcccagcccccttggctgattattaaagtgtatccttgagctgtagtaaattataaccgtgaatataacagcttttagtgagttttgtgagcacttctagcaaattatcaaacctaaggatagccttggggacccctgaacttgcagttggtgtcagaaataagggtgctcatgtgtgtaccatgccctctaattttgtagttaattaactttcacaactttattattaccgcttacactcaatgtttattcacatttatccacataccacttattctagtgccttgcatcaaagactttctatctcatgtactttattctgcttgaagtaaatcctttaggatattcttttttttttttaaactttgcacatacatacttttattttttatttatttttaattttgttatttttgtgggtacgtagtagatatatgtatttatggagtacatgagatgttttgatacaggcatgcaatgtgaaataagcacatcatggagaatggggtatccatcctctcaagcaatttatccttcaagttacaaacaatccaattacactctttaagttattttaaaatgtacatttaattttgtattgactagagtcactctgttgtgctatcaaatataattttttttttttttgagacagagtctcactcagtggcccagactgaaagtgcagtggcacaagctcggctcacttcaatctctgcctccctggttcaagcgaatctcctgcctcagcctcccacatagctgggattacaggcacacaccaccatgcccagctaatttttatatttttttagtagagacgggttttcgccatgttggccaggctggtcttgaactcctggcctcaaatgatctgaccacctcagcctcccaaagtgctaggattacaggcatgagccaccacacctggccaaaatagaatattctttagtgaggtctgctggtgacaatttttttcttttttttgagactgagtctcgctgttgtcagcttgggctggagtgcaatagcacgatctcagctcactgcaacctccacctcccggattccagcaattctcctgcctcagcctcccaagtagctgagagattacaggcacccaccaccacacgcggctaatttttgtatttttagtagaaatgggggttcaccgtgttggccaggctggtctcgaactcctgacctcaggtgatccacccaccttggcctcccaaagtgctgggattacaagcatgagccaccacgcacagccaattttttccgtttttgtctgaaatcttattttgtgtcatctttgaaatatatttttgatggatataaaattgttggttgatagttattatcattattattattattttgagacagggtctcactctgttgcctatgctggggtgtagtaatgtgatctcggttcactgcagacttgacctcctagggctcaggtgatcttcccacctcagcctccctagtagctgggactacagatgcatgccaccatacccaactaatttttctattttttgtagagatgaggctttgccacatttcccaggctggtctctaactcctgagctctagcaatccacccaccttggccttacaaagtgctgggccatgactagccagcagttactttttatagcatattgaatatttaatatgaatcttctggcatccactgtaactgtttaaaaaatcagctgtttacttggcactcttttttttttttttttttttgagacagagtcttgccctgtcgcccaggctggagtgcagtggcgtgatcttggctcactgcaagctctgcctcccgggttcacgccattctcctgcctcagcctccggagtagctgggactaaaggcgcccgccaccacgcccggctgatttttttgtatttttcgtagagttggggtttcaccgtgttagccaggatggtctcgatctcctgacctcgtgatctgtccgcctcggcctcccaaagtgctgggattataggcgtgagccaccgcgcccagcctcttttttttttttttttagacggagtcttactctgtcatctaggctggtgtacagtggcgtgatctcagctcagtgcaacctccacctcctgcctcagcctgccaaatagctgggattacaggtgcgtaccatcacgcccggctaatttttgtattttcagtagagatggggtttcaccatgttagacaggctggtctcgaactcctggcctcaagtgatctgcctgccccagcctcccaaagattacaggcatgagccaccgcacccggccaagtagcactcctttgaaggtaatctgcttcccctacccctagcaatttttaacaatttttcttcatttttatttcctgaagttttgttattaataatctgtgtgcagatttctttgtatttcttttgtttgcagttcatagtgattcttgaattagtgtgttggtttctgttatcaccacaggaaaattgtcagccgttagcttttcaaatatttccttgctaaattctctcttctcccctttcggtacaattgatttgattaaaactaaaaccagggccgggtgcagtgactcatgcctgtaatcccaacactttgagaggctgaggcaggtggatcacctaagctcaggagttcaagaccagcctggccaatatggtgaaaccccgtctctactaaaaatacaaaaattaccaggcatggtggcacacatttgtagtcaggaggctgaggcaggagaattgcttgaatccaggaggtggaggttgcagtgagctgagatcccaccactgcagtctggcctgggcgacagagtgagatgagaatctgtctcgaaaaaaaaagttatgaatgtttgataaactatatttgttagaatgtttgttgtagaatactattcattgatttttaaacaatgttagattaaaccattcactggatttgtgataattaacttactgattttacctcactgatttgttgtaattaatacaactggtataaaaagactgtgacgaggccgggcatggtggctcccgcctataatcccagcactttgggaggctgaggcaggcggatcacctgaggtcaggagttcaagaccagcctgaccaacatggtgaaaccccatctttactaaaaatacaaaattagccggtcgtggtggtgcatgcctgtaatcccagctcttcgggaggctgtggcaggagaatcacttgaacccgggaggtggaggttgcagtgagccgatatcgcgccattgcactccagcctgggcaacaagagcgaaactccgtctaaaaaaaaaaaagaaaaaaaacacataaaacaaaacaacactgtgacggttcccaaaaattaggagcataattaaaggaactcctgataaaaattaattttatcttacatgtaaactaaaatgactttatgaagttaattcagaaatacaatgcagggtattagtttgccacagctgcgtattcagcctaatgtaatattcttgttatttttaaattcttcttttaactttactcatatgtggatcatcaaatttcaaaagattaaatgacaatactcttagcagcaagcttccctaagcatataaacattttaatgggtgatgattcagaaggtacccgaagaatatgtactgccagatatcattcacccccatatacctgcccgacagacatcccattttgggaccctggataaatgtgtgggtggagagaaagataggagaaagtggtataagcaaatggctttggagtctgattgacagcgattgaaatcctgtctctacctcttaacagcctcatgatcctacataagttaccccgatcctcagggccacatctgtaaattgggggttgcgatggcagccatctcacagggtctcttttcggggaagggcaggaattatggattaagtgagctagtaattgtaaagcacttaatacaaggagggcgcataataagtacttcataaataatgacggccattatcatgactgaggtgtatgcagctgtcggggattacggcgacttcagaatttctggtgggcagggctcaaaggcagcaaatcacactggaagtcgaggtgaggcactgcttctgcacagactgcttagctggagagaatgaggaaggcttagaggagatttagaggaacttagagtcctccgcctccaactctgtgggatctgctcccgtgccagagacattcaggggatttctcgcactctcccctcccctacgtccctcccgccccatccaactaaccacacaacacatacaaaatagcccctgcgaggttctgcacgctggaagggaacaggagaagggcgctgcgctttcttgctgatgccctgtacttgggcccctggtagacacagccacttgtcccctcagcctgcagagaaatcccacgtagaccgcgcccgggtccttggcttcagccaatctccctttggtgggggtgggatgcacgatccaaggttttattggctacagacagcggggtgtggtccgccaagaacacagattggctcccgagggcatctcggatccctggtggggcgccgctcagcctcccggtgcaggcccggccgaggccaggaggaagcggccagaccgcgtccattcggcgccagctcactccggacgtccggagcctctgccagcgctgcttccgtccagtgcgcctggacgcgctgtccttaactggagaaaggcttcaccttgaaatccaggcttcatccctagttagcgtgtgaccttgagcagttgactttatttttcagtgcctagttttccagataccaggactgactccaaggactattactcatctggagggtttagcacagtaccgtcgcatagtaaatttccatgtcagttttggttacctttcatgcacttgcaaacatgccatgctctgaaacgaaataggcacatcttttttttttttttttttaaggagtcttcctctcgcccaggctggagtgcagtggcgcgatcttggctcactgcaacctccacctcccgtgttcgagattctcctgcctcagcctcctgattagctgggactacaggcatgccacgacgcccagttaatttttgtatttttagtagagacggggtttcgccatcttggccaggctggtctaactcctgacctcaggtgatctgactgcctcagcctctcaaagtgttgggattacaggcataagccactgcatctggccagaaatgaaataagtaaatcttttaacctgctctaacaatatagtgaaaagaccatattattattagagcaggttaagggatttgcctatttcgggttctagttatagtcttaaacttggacattcttgtagaaagtaaaaagtttcctcttcaaagttccccttcttgttaaagaatacatcataagtgttagaagtaatagtttattttaaagactaactttcttcaagcctccttgctttgtgctaataactctttgttaagccctatcctatgtaactgttggacatgctcacaggcacgttccagttcacagcctatgccccttccttatttggaaatgttattgcttccttaaacctttcggtaagcaacttcctctccttcttcgttcttccttgcacttacctatttagaaagttttaggctattagcaaatcggctatcagtttaagagtgtgaggtcccgctccagccaatggatgcaggacatagcagtgaggacgacccaaatgcgtaagggataaatatgtttgcttttcctttgttcaggtgtgctctcgacatcgttccatctgcgattgagcaccctttctgcagaaagtaaagattgccttgctggagatcttttgtctccgtgctgacttttcttcgtggcaccgattatctatttctaacaattttggtatttctaacattctgaacaatcttgggctagttgtctcttctgggcctgtttccccatccgtcacatgataaacttcattggtttaaaaaccccagcgaacatttattgagttactattaccttcctgccctccccaaccccaaccccagggagcagttacaacctcagccgctgagcgcactcgccgggtgttaagaagcaccaaagacagggaggcttgattgattttgctttgggagtagagggtcagaagattcacaggaaaatggcatttgagcaaggatgattcactggagctagcttttaaatactggcgaggcttttatgttgcagtcccttacaaagttgagcattcgcagggactgcactccgaaataagcccgcttccccttttcattcgctaatgatccagggagctgctggttccgcatgcggcaggttgtgccttttcctaatcagggttctgcatcgcctcgaacccgcaggccgtggcgggttctcctgaggaagcagggactggggtgcagggtgaagctgctcgtgccggccagcgcctgtgagcaaaactcaaacggaggagcaggaggggtcgagctggagcgtggcagggttgaccctgccttttagaagggcacaatttgaagggtacccaggggccggaagccggggacctaaggcccgccccgttccagctgctgggagggctcccgccccagggagttagttttgcagagactgggtctgcagcgctccaccgggggccggcgacagacgccacaaaacagctgcaggaacggtggctcgctccaggcacccagggcccgggaaagaggcgcgggtagcacgcgcgggtcacgtgggcgatgcgggcgtgcgcccctgcacccgcgggagggggatggggaaaaggggcggggccggcgcttgacctcccgtgaagcctagcgcggggaaggaccggaactccgggcgggcggcttgttgataatatggcggctggagctgcctgggcatcccgaggaggcggtggggcccactcccggaagaagggtcccttttcgcgctagtgcagcggcccctctggacccggaagtccgggccggttgctgaatgaggggagccgggccctccccgcgccagtccccccgcaccctccgtcccgacccgggccccgccatgtccttcttccggcggaaaggtagctgagggggcgccggcggggagtcaggccgggcctcaggggcggcggtggggcaggtgggcctgcgagggctttccccaaggcggcagcaaggccttcagcgagcctcgacctcggcgcagatgccccctgagtgccttgctctgctccgggactcttctgggagggagaaggtggccttcttgcgcgaggtcagaggagtattgtcgcgctggttcagaagcgattgctaaagcccatagaagttcctgcctgtttggttaagaacagttcttaggtgggggttagtttttttgtgtttctttgaggaccgtggatcaagatcaaggaaatctctttagaaccttattatggaagtctgaagtttccaaatgttgagggttttatgtctaaaagcaacacgtgaaaaaattgttttcttcacccagtgctgtcttccaatttcctctttggggggaggggtagttactgctgttactaaaataaaattacttattgctaaagttccccaacaggaagaccactacttttgatgactttggcaagtttgctaactactggaaccctaacttacaaacgaactacttacatttttgatttccagttgtattacctgcccaatgtttacgtagaaacagcttaattttgattctgggtaacgttgttgcacttcattaaaaatacatatccgaagtgagcaagtatgggtctgtggacagcagtgatttttcctgtcaattcctgttgcttcagataaaatgtaccagacagaggccgggcgcggtggctcacgcctgtaatcccagcactttgggaggcttggcgggtggatcacctgagatcgggagttcaagaccagcctgaccaacatggagaaaccccgtgtctactaaaaatacaaaattagccagggtggtggcgcatgcctgtaatgccagctacttgggaggctgaagcaggagaatcgcttgaacctgggaggcggaggttgcggtgagccgagatagcaccattgcactccagcctgggcaaaaagagcgaaactccgtctcaaaaaaaaagtaccagacagaaatgggttttgttttctttttttgttttgagacggagtttcgctcttgttgcccaggctcgagtgcaatggcgcgatctcagtctcggctcactgcaacctctgtctcccaggtttaatcgattctcctgcctcagcctcccaagtagctgggattacccatgccccaccatgcccggctaatttttgtatttttagtagaaacggggcttcaccatgttaggctggtcttgaacccctgacctcaagtgggcctcccacctcggcctcccaaagtgccaggattacaggcatgagccaccgcggccagccagaaatgggttttggaaaaagcactaaacaaaatcgaacttggtttcatatgacagctctgctgctaactgtaacaggggcagaccagttaacctacttttctgtcttctgtcagctgagaattagatgattcccaaaggcccattgaactctgaatgactttaaatacttcttcttaagtgggtacacggttttggtaactgatgccaggtgatgaatgcatgaaagtgcttaatgaatgaaaccggtaaaatagtaggaggaagctttattggtaaggcaggggtatacctaatagctctctaatttattggtattgaagtggttaacttttgtttttttaaggggggaaaacattctaagaataatgaggcaaactgcatattgcacaagagactgttgtctctattcaacaaataccttttgagtgtccagagtctgccaggtgctgtgctaggccctcacgattgagtagtgaaccagagaatgtccctgcacccatggagcttattgtctactggggtagacagataataaataagcaaacaaatcttctctcttctccctttcgctccatgtaagtgtgtgtgtataggtgtatacttacaagttgagtaaagtgttatgaaagattaagaggagaaatgcattttggttagatgttagaggactcagcaggtgaccttgaaacttagagctgaaggatcagtaggaggtaactagagaggccagggaatcgcatgttcaaaggccaggaggcaagaaagagcatggtgcccttcaagagaggaaagaaggctactgtgactggagcatagatgtaggcaagtgttgggtgattgagagctctacgggccatggttaggttttattcctaatgccgagatgccaaacatggtggttcatatctgtaatcccagtattttaggaggccgaggcaggaatatagcttgaacccaggagttcaagaccagcctgagcaacatgagacctgtacaaaacatttaaaaaattgctgggtatgatggtgcacacctgtggtcccagctactcaggaggctgaggcagaaggatcacttgagcctaggaggtggaggctacaatgagccatatttgagtcactacactccagcctggatgacaaagtgagaccatgtgtcaaacaaaatacagaaagaatattaatttaaaattttgaaagaggagtgatctgaacttatatcttaaaaagatcattctagggcatggtggctcatgcctgtaatcaagggctttgggaggctgagacaggaggatcacctgaggccagttcgagatcaacctgtacagcatagagagactccatctctacaaaaagaaaaaataaatagctgggtgttgtgagttattcaggaggctgaagcagaaagatcacttgagcccaggagtttgaggctgcagtaagctatgatcccaccactgcaacacagtgagatcttgtctcaaaaaaaaaaaaaaatcattctaggtgctttttggaggctggatgtggtaagagtagaagctggagatggtcctgttagggattcgattcagactttaaataccatcaatgcattgagtcccaaatttacatcactacgttggatccttgcccctgaatccagactggtatatccaactttaggttcagtttgtatctctacctgaccaatatagaggtgtccagtcttttggcttccctaggccacattggaagaagaattgtcttgagccacacatagagtacactaacgctaacaatagcagatgagctaaaaaaaaatcgcaaaacttataatgttttaagaaagtttacgaatttgtgttgggcacattcagagccatcctgggccgcgggatggacaagcttaatccagtagataccttcaacttacaatatctaaaattttatgccagatttagtcattttaaacctgctcatcagtttttctcaagaagtagtattttggctttttttcttttcttttttttgagatggagtttcgctcttatcgttcaagctggagtgcagtggcggatcttggctcactgcaacctccgcctcctgggttcaagtgattctcctgcctcagcctcgcaagtagctggaattacaggcatgcgccaccatgaccagctaatttttggagacagggtttcaccatgttggtcaggctggttttgtactcctgacctcaggtgatctgcctgcctcggcctcccaaaggctgggattacaggcatgagccaccgctcccggctgcatttttggatttttagttgctcagcccaaaactttagtacatctttgaacctcttctttcctcctactctatatctgatccatcagcaaatctgttaggtctacctcacacatatcgaaatcctaccacgtctcaccatctgtgacaattaacaccctggtctaggcagtcatctctgttaagattgagtggttaaggatgtcctctaaggagatgacattcaaatcttagcttaaatgtcaagagggagctggttttataaagattgaggaggcagcattattttgccataggcttccatttggtttccattccattcttgatacttatggtatatattcaaaacaaatgcacagaaacagacccaggtatattgggaatttcggatatagagttcctagttgggaaaagatagactgatctgtaaatgatgctagttatccatcatctggcaaaaaataatttcctgcctcctctcatatatctcagatcaacagactttttctgttaagggccaaatcataaatattttaggctttccagaccatatggtttctgtcacactctcctttatccttgaagccatagacaatatgtaaacaaatgggcatggctgtgctacgataaaactttacttacaaaaactggtagtgggccagtttaggcatggccagcactttgggaggctaaggcagatggatcacttggggtcaggagtttgagaccagcctggccaacatggtgaaaccctgtctctactaaaaatacaaaaaatagctgggcatggtggtgggtgtctataattccagctactctggaggctaagacacaagaatcacttgaacccaggaggcagaggttgcagtgagctgagatagcaccactgcactccagccagggtgacggagtcttaaagcaaaacaaaacaaaaggtagtgggttgtatttggcccatgggctgtagtttgccaatccctgatgcagaaacaaattccaggtaaataagagcctggaatgttaaaaaaacaaaacttgaagtcatgtagaagaacaggtagggggaacaatcctgatctcaggataggaagggatattgcttaaaataagacacaggaaaatataatccatgttgtgtaaatttgactacgttaaaacttaaaactttcgccaagcgcggtggctcacgcctgtaataccagtactttgggaggccgaggtgagcagatcaccaggtcaggagattgagaccatcctggctaacacggtgaaaccccgtctctactaaaaatacaaaacattagccgggcgtggtggcgggcgcctgtagtcccagctacttgggaggctgaggcaggagaatggcctgaacccgggaggcgaagcttgcagtgagctgagatcgcgccactgcactccagcctgggcgacagagtgagattccgtctcaaaaaaacaaaacaaaacaaagcaaaaaacctaaaactttcatacaataaagtatacctaagatacttctagaagagaagatttacatccaggacgtgtatggaatttctgcaagtaataagtaaaagacaagggacatgaagaggcagttcacaaaagaggaagccaaaatgaccaataaacatgaaaggatgtttaacctcaaaggaaacaaggaaatgaattaaaaacatcaaatgccatttcaaaactagtaagttggcaaaattaaaaataccaaggatgagaatatgaagcatggctatatgagtgcatggaatggtacagtcactttcattaaaaatgcacataatttgttttttatttatttttttgagacagtctatgtcgcccaggctagaatgcagtggcatgatctcggctcaccacaatctctgcctcctgggttcaagcaattctcctgcctcagcctcctgagtagctgggattacaggcacatgccacaacgcccggttaagttttgtatttttagtagagacagggttttgccatgttggccaggctggtctcgaactcctgacctcaggtgagctgcttcccaaagtgctgggattagaggcgtgagccaatgctcctggctgaaaaaaatgcacataatttgttacctagcaattccatgtctagaggcttatcctagagaaattcttgcttatatgcataggaagacgtgtactagaatgttcactagttgaatgtttaagtgaaaattaggaaataaagtaaatgttcattaacaggaaaatgagtaaaggtatatttataaaacaattaagtagctaaaatgaataaactagagctgcgtgaatgaactagaactggttcaatagtcatgtcagattattgaatgaatacaggtcagatatgtatagagtgtcatttgtgtaattaattttttttttttttttgagatggagtctcactctgttgcccaggctggagtgcagtggcgtgatctcagctcactgcaacctccacctcctgggttaaagtgattctcctgcctcagcctcccgagtagttgggattacaggcatgcaccaccatgcccagctcattttcctatttttagtggccacagggtttcaccatgttggccaggctggtcttgaactcctgacctcaagtgttccacccaacttggcctcccaaagtgctaggattacaggcgtgagccaccgtgctcagccatttgcgtgatttttaaagatgtgcagaataatgccattaaaaaaaatacacatacatgtatatatatacacgtttggctgggtgtggtggctcacacctgtaatcccagcactttgggaggctgaggcaggaggatcacttgagcccaggtgtacaagactagcctgggcgagatagcaagaccccatctcaacaacagaaaggataattaggtatggtggcatgagaggatcacttgagcccaggagttcgagtgttatcaggccactgcactctagcctggacaacaaagcaagaccgtgtctcaaaaaaataaaaataaaaagtatttgtatgtggtcatagtcaaaaaacgtacatggaaggaaaatgtctttatttatttatttatttttttttttttaagacagagtcttgctctgtcacccaggctggggtacagtggtgtaatctcagctcaccgcaatctcggcctcccgggttcaagcgattcttctgcctcagccttctaagtagctgggactacaggtacccgccaccacaccctgctaattcttgtgttttcagtagagacagggtttcaccatgttggcaaggctggtctcgaactcctgaccttaagtgagccacccgccttggcctcccaaagtcctgggattacaggtgtgagccactgcgcttggccaggaaatatctaatttagtaagtatttatatctgggaaaggaagggtcaggtggtgattcataggaactctaaagtctatgtataatacttagggggacagaaggaaataaagcaaaatgctgatatttgattgttgagttgtgtatatgttagaagtataacataggagatctgattgatagtaggagaatgtttttaggtggtaaaagtggaaccgtggtggtttgttttggcagtagaatcagttggtcatagtttgtatgtggaaggtaataaacagaccatgttaaggatgacttccggaattttggtctgagtagtgggtggatgacagtgtcattcatgagggaagatgaagactgaggtaggaacaggtttgggagaagatgacatgttcccttttagacaagtggaattatggaagatggcaggtaggtggttagctatatgaatttgagataaaagatttaggatggagatataaatttaggagtaacagcgtatctatggtattgtaagccttaagaatgggtaggatcagccaggaaatacagatgtatatgcagaagagaggagtcaaggaagccaagacaagttaatgtttaaagtgagtgatgtagtccatgggcagatgctgctgagagggctgcaaacaccagtgaccctacaacatttttaaatgtcgtcttcctgacagcagtgatcagtacctgcaacgatcttatttatttttttcatgttagtctccacacacttgaatgtagactttttgaaggcaaaatcattgccttttctgagctgggagcatgtctggcacataccaagcactcaacagttgatgtattgacttcatccagatactctgagggcgagttatttcctgctactagcctttcacctttcaatgtttaagagcacaaatacagagatgggcacgttttggcatttcttattttgataaccttttcctggtaagattttttaatgttgaaaaaaaaaaacaagaaaagagggttaaaaatagtcttatgtcagatcctgtgatagaattcacacttggcttaagctgctgggcaccttcctatcttggatgtcatattagcttatctacagcagaatttttactgttttatgtagtaaggaagcaattatatgattattttacagacaaattattctttatcttttatttttttagacggagtctctctttgtctcccaggctggagtacagtgtcgcgatctcggctcactgcaacctccgcctcctgggttcaagcaattctctgcctcagcctcccaagtagctgggcttacaggtgtccgccaccacacccagctcattgttttgtatttttagtagagatggggtttcaccatgttggccaggctggtcttgagctactgacctcaggtgatccacccgccttggcatcccaaagtgctggaattacaggcgtgagccaccgtgcctggcccagacaaattattatactctgagtgttagaggcttaggatgttttcacttgatgctatgggaggaataagtaataagatatgatacacaaccaaagacctttcttcactatgcttctagtagctagtactatggatgacacatggtaataatattggttagcatttgtcctcaatttactgtgctagttactcttctaagccccttacaggtatatattttttttcatcaataatcctctaaggtagtttttattattgacctaattttataaatcaagaaaattaagacccagagaagtaagtaacttgtccaagatcacatggcttataagtggtagagccagaatttgaccccagatgttgtgactacattgtctctccataagcaggttcaactcttttgactggatgctgttccaaggtcacttccttagagaagcctttgctgacaactaccctcctgtgccctcctccaaggctgtccattgttctagaactttgaatactcatcttagaataaagctggtctaatttttacagtgttatagaatggatctctgactgcaaaagttggtcataattatctttttatgttctagtgaaaggcaaagaacaagagaagacctcagatgtgaagtccattaaaggtaagttctgcccttggcagtccactgcattaaaaagtgatgtgctttgcatttgtgagttctttaatcctgttatactctctcttttggcattaatcatttctgccttattttataattacttatgattttgatttatttccctctttaacctgtataatgctttaacatctagcatataataagtaggctttttttttttttttttttttggagacggagtcttgctctgttacccaggctggagtgcagtggcgcgatcttggctcactgcaagctctgtctcccgggttcacaccattctcctgcctcagcctccccagcagctgggactacaggtgcacggcgccacgcctggctaattttttgtattttttagtagagacagagtttcaccatgttagccagtatggtctcgatctcctgaccttgtgatccgcccgcctcggcctcccaaagtgctgggattacaagcgtgagccaccgcacccggccgtaagtaggctttttttaccttaattttatttttttgagatggagtcttgctcttatccccaggctggagtgcagtggtgccatctcggctcactgcagcatccacctcccgggttcaagcgattctcctgcctcagcctcccgagtagctgggattacaggtggccgccaccatgcccagctaatttttgtatttttagtagagacagggtttcaccgtgttggccaggccagtctcaaactcctgacctcaagtgatccactcgccttggcctcccaaagtcctgggattacaggcgtgagccaccatgcctggccataagtaggcttttactgagccttgtgtgtattggctatcctagtgattacagtgaaccagtgcccttcttattaatcacacatttaattgttccctaaaagtgattagttcactttatttatttagtaagacaaaaaatgaagaatactcttaactgagcagtctgttaactgtaggaaagcactgacacttataaggcttagttttctgtcatttatccagaagtatggttgattacagtttttacttttttatttgaatgaacaaccttaatttaaaatatattttgtttattttttgttgggatcgatacattgtccttgtttatagattagagcatgctttttaaagatgctgtattactcactgattttatttgtccagtgtacagagattgaagtgggaaaattataatggaaattgtttccatagtcattacatattaatttcatcaatttatttccataaaatctgtagattgctacttatttagatttttccttcaaatgtttttatgttgtattgcttgcactgagtatttattctatatgctcaatttgctggagaagaagactaattataacttaggcaagttgtaaaattagggaaaaaagtaaggtaccttacagcctagtttacttatttcttatgtaaagccagttagattccacattagttcaaactgccttctttgagcaaaacttgattggcagtgataaaggcttaaagcccttctcaagcagagacctgtaaagactagatctgactgtagtagaaggaaggaacttagatgtttcaggcagtgagaacaccagtcttccactctaaactttgccactaacagtatgaccttgggaagttgtaactttcttcagattcttcatttgttgaatggggggattggcctagctaatttctaaatctctactgggctaaaaaattctgtgcttatactctgattatgaagtacataatctgtgcttaacattcactgacttatccttaggataatacagaagcagtacaagaaacagcccctcaagatgtttgcagtctggttagaaagacaaacttatacacagaacagtagcaaatagaccaaaataataatagctgccatttatagaacacttcttctgttctgggcattagacaaaaactgactataacggtgaacaaaaaagacttaggtcctgccctcattgaacttacagattagtaggggagaggaacattaatcaagtaattccacagatggcttagcctagattggtagtgatggaagtaaagagatgtgaacggacttgaaaaaaaattcggaggcaaaatggatagaagtttattattgattaaatatgaggtgtgagagagagggatatttaagattgatacctaccttctggcttgcctaacagaaccaaaacaggaaattatatgttcagttttgttatgttgggtgggaggtgcttttgagtcattcatttatatatgttatatatgttattttatatgcatagtaattttaaggtctgagttttaaaccaaaggttagagagtgattttttagagtctagcaaacctaagttgaaatcctgcctgttgaaatggctgtttactagctcattaacctagggcaaagtattcaacttgttttcatttttgtcttcatctctaaaatgaggaaaatatggtcttacaagattgtcctgagagatagatgaaataatatccaaaaaaaaaaaaggtacatagagaaactcgtatagtgcctggtatatagtaggtcctccattggtagctatcattatctagttttaacatagccttcagtttgttgaattagtcaaactgagtgaagcactgcaaggaattcagaggaatttgagatcaacaaatgatttctgaagtttagggaagacttcatggcaatgacacttaccttgtataaaagttgaagaataagaaagatttgaatgagagattctttctcttctccctaccagcccagcttcttatttgaggatatattgggcaaaggggccttcagacaagtagagggagatttttacagaaagattgagatgaaggtatagaaggctgtaaagaccagaaaagagaattgagacagaggaagcaggaagccactgtaggtttttgagcaagatattgatgctgtaagtatggtgtttatgaaaggttagtctggaagagatttgcaggatggagaccccggaagtttttttgttataatacagaaagacttgcactgagggtgaggtgttaaaaataaacaggtaagtaaatgtttaaacatcttgaaggaaaagtcaacaaatcttggcaagtaaacagataacagtgaaaaagaatgggaccaagattttgagttttggagactggtggattgaacagacagggaaattgagaggagaatcagatgatgatgttttaagttgatatttagacagattgtgcttgagatggtaaagtcaatgtgggtgggaatgcttagtagcgagtaatcagtgatacaagaccaaagcccaggtcaaagacaagtcacagatacagatcagggctttttcatctgctccacagaggtgtaccctaggagctgttgcaaacagtccatgtggagggtgtgagtaagatgtttcccttgaatttgccagaattacttttttgttgttgttgttgttttttctgagacagattctcgctctgttgcccaggctggagggcagtggcgagatcgcgcagctcactgcaacctctgcctctcgggttcgagtgattctcctgcctcagcctcccaagtagctgggattacaggcttgtgccaccaagcccagctaatttcttttgtatttttagtagagatggggtttcaccatgttggccagactggtctcgaactcctggcctcgtgatctgcctgcctcagcctccaaaagttctgggattacaggcgtgaaccactgcacccggtcccttgttaagtttattttggtgggaagcaaaggaggtttcagcttttaaaaagtttgaaaattattgctctggtaataattaaagatttgagagtaaatatgctttctagcagaaagaataaaagaagaacagatagcctcaagaaggggagccaaagaagcaggctatatctgacacactgggtgttgataaatgggtattaaaagaatgagagcaatgagcagatagaagaggaaattaggagagtataataccatggagaccaagaaagatagactatcaggaaggagtggtaaaaataagttactagttctaagagagatgttaagagggaccggggaaagccttgtacaaatgagttagtagcattttacattatatacatctaattaagaaacaatgcgagagtctcaccattcctatagactcttacttgtacttgtctgaacacgaaaactggcttttgtttataaataagctaaaaattattttgctccaatttctcatgaaaataaaaataaaccttcttttaacattgaaaaaatagtttgaagacagtcactcttcattttgtaattcccacaactattattgaatgactgaaattatctttattctgaagccaaaggggtgatactgatatttcttcagactactaaaaatatattttatgaatttttagtgtgctttatctttttttgtttttttttttgagatggagtttcactcccgttgctcaggctggagggcagtggtgcaatctcagctcactgcaaccttcgcctcccagattcaagcaattctcctgcctcggtctcccaagtagctgggattacaggcacctgcccccacacccagctaattttttgtatttttagtagagacagggtttcaccatgttggtcaggctggtcttgaactcctgacctcaggtgatccacccaccttggcctcccaaagtactgcgattgcaggcatgagccaccatgcctggcctgaggaatatttttctaggttccccccaccccaagcatttattctgcaattttagttttgttcctaaagcaagcaaggtttaaggatttaaaaataatccgtattttagaatgctttctggctttgttactttttatccacagtagaagttctcagagaatgatctccctcttttaatttaactttttggcacagtattttgagaattataaataatattagaatgttttctggctgggtgtggtggctcatgcctgtaatcctggctacttgggaggctgaggcaggagaatcacttgaacatgggaggcagaggttgcagtgagccgaggtcatgccactgcactccagcctgggtgacagagcaagactctgtctgggaaaaaaaaaaaaaaaaaaaagagtgttttctttcctattttccaccacttgattaagttacttttcctcttaagtattttttgctgagtatgctgacttaagagtaatgttacaaaatttaatttttaaagttctctgaaagcccctttatgagagttttaggctatcaaattgtgtttaattcttaacaattttttgaaaaattatagcttcaatatccgtacattccccacaaaaaagcactaaaaatcatgccttgctggaggctgcaggaccaagtcatgttgcaatcaatgccatttctgccaacatggactccttttcaagtagcaggacagccacacttaagaagcagccaagccacatggaggccgctcattttggtgacctgggtaagtaactatcattttttattaacttgtattagaaggatttgagtacaatatgtgaaacttctgtcataggatacagaactatataattggaaagtgctttggaaaaaatgtatttaaaataacagctacaagtataatgggtagctgtgttgtgttcctgtaaatatagaatataaagcatgcccagtagaaaaacaagcatttccagaagaaatatatctgatcactaaatataaatatatgaaaaagatgtctcactttattactgagggaagtgcaaattaaaataatcagttaatgttctcctaacacattagcatattttttaaagtttgacaatttgaatgtcagtgaagatgcagggaaatacccctcctatttagtgataatataatctggtgaagactctttggaaagcaatttggaaatcagtataaaatatgcatgtcatttaggccactctttctaagacctagccctcagatatgctcattcatatgtgcaggtgtgtatgtgtgtgtgtgtgtgtgtgtgtgtgtgtatatgtatgtatgtatgtatgtatgtatgtatgttgaaggctattcattatagtattgtttgtgatagcaaaaaattatggacaacatataaatatctgttatagggaaataaccaaattgtggtatacgcatgctctggagtataatatagccatttgtttctatttatttattttcttgagacagggttttactctgttgcccaggctggagtgcagtggtatgatcatggttcactgcagccttcacctcctgggcacaagccattctctcgcctcagcctccagagttactaggactgcaggcatgtgtcaccacacccagataattttttaattttttgtagagacagggtctcactatgttgcctaagctggtctcaaactcctggcctcaagcaattctcccacacaggcctcccaaagtgctgggattaccaacgtgaaccaccacacctggttcagtgtagccatttagaaatctaaaaaagacgtgggaaaatgtctaaggcatgtttaaatgtgagaaaagcaagtcacagtatgcatggtaaaatccgttatattaaaataagttcttccaaaacaaaaacatatgcaggagacctttattttgtcagtatttcttacccaaatttctgcacttagaaaattgcatgtcatgttgtcataagttgaaaaaaagatccatgaaccaatggacttctaataaaatcagtcctgcttttgacatctctctctacttttgtgtatattcaaaccagagtgtcaatgtgtttgtggggcacacttagcaataatacatagcagacaaaatgcatatagctcagagagtaaaattgtaagttttgctagatcactcataaattgctgatgagaatttaaaatggtgcagatgctctggaaaacaggcagtttctttctttctttttttttttctttttgagacagggtctcactctgttgcgcaggctggagtacagtggcgtgattacaactcactgcagcctcaccctcctcaggttcaggtgatcctccctcagtctcctgagtagctgggactataggcatgcaccaccacgcctggctaatttttgtattttttttttttttttttgtagagacggggtttcgccatgtttcccaggctggtctcaaactcctggaatcaagcgatccacttgcgtaggcctcccaaagtgctgggattacgggcgtgagctactgtgcctggcctaggcagtttgtttgtttgtttgtttgtttgtttatttatttgtagacggagtctcacaggctggagtgcagtggcccaatttttggctcactgcaacctccgcctcccaggttcaagctattctcctgcctcagcctcctgagtagctgggatgacaggtgcctgccataatgcctggctgatttttgtatatttagtagatatggggtttcaccatgttggtcaggctggttttgaactcctgacctcaggtgatcagcccgcctcggcctcccaaagtgctgggattacaggcatgagccgtcatccctggctggtggtttcttatgacgtgaaacatgcaattaccatatgacctagcagttgcactctgtatttatcccagataaatgaaaacttaccttccaataaaaacctgtgcacaaatgttcatagcagcttaatattgaaaaactggatgttcttcagcaggtgaatgaactggttcattcataccatggaataccattcagcaataaaaaggaacaaactgttgatacatttaaccacctggatgaatatcaagggaattatgctgtcagacaaaaaccagtccctaaagactacatatagtatgattccgtttggataatattcttgaaatagagaaattaagagaaatgaaaagattagtgtttgccagatgttagagacagggaggtgagaggggtaagtgggtgtagttataaaagtgcaacatgagggatctttgtgatgttgaagttgtatcttggcagtggatgcagaaatctcaatgtgataaaattacaaagaactaaaaacaagaatgagtatagataaaactggggaaatctgaacaagttagagtgttgtatcactgtcagtatcttagagtgatattgtactatagctttgcaagatgttaccatgggagaaactaaagtgtacaagggatctctaggtattattatttttttagagatggggtttcactatgttccccaggccggtcttgaactcctgggctctagtgatccgcctgccccagcctcctaaagtactggaattacaggcgtgagcgaccatgcctggccctttcagtattgtatcttagaacttcatgtgaatctagcattatctcatagaatttaattaaaagaaattgtaaacctcacagaagatcagaatttcctcaagtttgtgatgttgacaaagatgaactagttgacactgacagtaagactgaggatgaagacacgacgtgcttcaaaaaaatgatttgaatatcaatggattaagaagaactcttttgacaaattgatgaaaccctcagtcagttttataagaatgcccatctttatgatcatgctatgaaagccaatttttaaaaaaattttttgtctttcctaacaattagcttgtggttataatttaaatttagttaaatataagataaatgattttttattaagtttagtttcatttttcaaggtacgatctcaaagctactctttaacctactatgaatgaataatgctgagttcataacatctttgtagatatatccacaattttccctcaggataagtgcctacaagtggaattactggactgaaaataatgcagtttgctaagactttgctatctgttcctgaatgctcctccaaaaaggttttgccagtttacatcctcatgaccagcgaatgagagtgttgcctattttcctgtgcccttgttactgcttaataatttttgaaaaaaatctaatttgacagacaaaaatgcattttatgttaatttgcttttctgggatttttaatgaggttgagtatagtttttaatatttttattggcccctttggaactagtatcataagttttttttcttaagaatttatgtagtctgggctgggcgcagtggctcacgcctgcaatcccagcactttgggaggccgaggtgggtggattgccgaaggtcaggagtttgagaccatcctgaccaacatggtgaaaccgaatctctactaaaagtacaaaaactagctcagcgtggtggcgggtgcctgtaatcccagctacttaggaggctgagtcaagagaatcgcttgaacccgggaggtggaggttggttgcattgagccgagatcgcgccattgctctccagcctaggcaacaagagtgaaaagtctcaaaaaaaaaaaaaaaaaaaaaaaaaagaatttacatggtctgaattgccattaaaagagatatgagaattattgagtaacaaataactttttaataatttaggcaagttttggacgattgtactttgtttagaaaccaaaagcatagtatttgtagtttttttatttactttagttgctaggaagtaaactttattcaaggtctctggtaccagttgttgctaaaagtgattgactaatctgtcaatctgaaattatttgttgctgaactgctaattcttttgcttctatcttttaggcagatcttgtctggactaccagactcaagagaccaaatcaagcctttctaagacccttgaacaagtcttgcacgacactattgtcctcccttacttcattcaattcatggaacttcggcgaatggagcatttggtgaaattttggttagaggctgaaagttttcattcaacaacttggtcgcgaataagagcacacagtctaaacacagtgaagcagagctcactggctgagcctgtctctccatctaaaaagcatgaaactacagcgtcttttttaactgattctcttgataagagattggaggattctggctcagcacagttgtttatgactcattcagaaggaattgacctgaataatagaactaacagcactcagaatcacttgctgctttcccaggaatgtgacagtgcccattctctccgtcttgaaatggccagagcaggaactcaccaagtttccatggaaacccaagaatcttcctctacacttacagtagccagtagaaatagtcccgcttctccactaaaagaattgtcaggaaaactaatgaaaagtgagtatgtgattttcttgtgtgtacatatgtgtctcactttctttttttaatttactaagcagaacttcagatgaggaataaaatgattggaatattttttttctcctctaactacttgtaaatttgggagaatttggagagtgtagtagagtcagatcagtgtatggaaaaggagcaggagtgactggaccttctaagaagtgtgttatcagaattagtaaatgaagggtcaaatgtcctacttttcccctccactgattttgacatcaaaccattatccacatagccttatttcctccctcggtcttaattttattaatattttactgcactttgcagataaaatttttaaaaaatttttaaaaattgccaataagtgacatttattaagttcagtgcttagtgtatatttggattttatttattagtcacaagacctttgtgcaggtagtaggcatgattatctttttttttttgagatggagtcttgctctgtcgcccaggctggagtgcaatggcgcggtctcggctcactgcaacctccgggttcatgccattctcctgcctcagcctcccaaatagctgggactacaggcgcctgccaccacacccggctaatttttttgtatttttagtagagacggggtttcaccatgttcgccaggatggtctcgatctcctgactttgtgatccgcctgcctcggcctcccaaagtgctgggattacaggcatgagccaccgcgcccggactgattatcttatttacacatgagaaaaccagggcttagaaaggttaggtaacttcctctaggttgtacagtaaatgtggacctagaagcattttgacaagagcacctgtttttttttcttctctattagtttagaaattatatactcttaattatcacctgggattttgattagacagccttcatgttctttttcatcttaaatgttctttgtgtcttaaagggctaagtgatttcttcagatcttttagttcactcattctcagtgaactaaaatgaggtctaatctgctactgaatcaagttttcagcatgttatttccttcctccctccctccctccttccttccctcaaccaggctcccgaggagctgggattacaggcgcccgccaccactcctggctaatttttatattttagtagagacggggtttcaccatgttggtcaggctgatcttgaactcctgacctcaagtgacccacctgcctcggcctcccaaagtgctgggattacaggcatgaatcaccacacctgacggcatgttattttcatcgcaaagttactgtaagctgggagaagtggcacacacttgtactcccagctactcaggaagcttaaggtgagaagattgcttgagcccaggagttttgagaccaacctgggcaacacagcaagaccccagctcaaacaaagaaaaaaagttattgaattttttatttctatggatcattttttgtagtttcttattcctttcacccttcattcccacttttgatcccatcttttatttatttagttttattaaatgtatatttgtctgataattctgctatctacagttttttgtggacctgactcagcatttctttgtttcttcggattcagactgttggtggcttgtgattttagtgatttttggccgtgaacatgtttcttggacttttgtctgtgggaattctctgtgtactctgtataaattaagttacttcaggtgttttgcattttcttttgccatgcacctggggcctgggtcactacccttctggtaccacttaaaactgaatttttgtcttgggtgctcgtactgatcctgtatgagtacaggtttatacttactgtagaaatatggtgtttgattatggggtattgtcccagatggtgctggagtattaatatgctctctgttaaacttaatgtgttgtccctgtaaaactccaaaattctgaattccagaatactactggccccaaatgtttaagataagggcactgcctgtatttgtttctgcctcccactattttccttagtttaacacaaactcacctttttaaaaaacattttgagagaattcagtattgggaagagtttctaacctgtttctggaaatggaagtccaaagtctgtttctgtaattgttttttttttgagatggagtctcactctgtcacccaggctggagtgcaatgacgtactctcagctcactgcaacctccacctcccgggttcaagcgattctcttgcctcagccccctgagtagctgggattacaggtgcccaccaccatgcctggctgatttttgtatttttagaagagatggggtttcgccatgttggccaggctggtcttgaactcctgactttgtgatctgcccacctcagcctcccaaagtgctaggattatgtttctgtaattgtaatacatttattgtttttagaaactgtctttgctttagtggtaattttcaataaaaatagaaatagcagtggagttattaaaagagcattagttacatttttccctttttcattatcttcaaatattatatatagtaagtttgacctttttaaaatgtatacttgtatcagttttaacacatacatagattcctgtaactgtcaccactataagggtaaagaacagttagttccttcacctttgaagtcaagccccacctctatcccaacacttggcaaccgctgatctttctccgtctcaatagctttgccttttctctttttttttcttatttttttttttgagacagcgtcttgctctgtcgcccgagctggagtgcagtgaggcaatctcggctcactgcaacctccgcctcctgggttcaagcagttctcctgccttagcctccctagtagctgggattataggcacgcaccaccacacccggctgatttttttgtatttttagtagaaatggggtttcaccatgttggccaggctggtctcaaactcttgacctcaagtgatccacctgcctcggcctcccaaagtgctgggattacaggcgtgagccactgtgcccaatcaggactttttttttttaaatttacattcaacttgtcatttttttcttgtatggattgtgccttcagagtcacacctaagagccctttgcctaagcaaaggtcatgaagattttctcatatgtttccttttaaaagtattgtggttggccaggtgccatggcttatgcctgtaatctcagcactttgagaagctgaggtgggcagattacgaggtcaggagatcgagaccatcctggctaatgcggtgaaaccccatctctactaaaaatacaaaaaaaaaaaaaaattagccgggcgtggtggcgggcacctgtagtcccagctacttgagaggttgaggcaggagaatagtgtgaacccgggaggtggagcttgcagtgagccgagatcgcgccactgcactccagcctgggcaacacagtgagactccatctcaaaaaaaaaaaaaaagtattatggttttacactttacgtttagatatatatcttttttgagttaatgtcgtataagtatgagggttacgtcagattttttgttttttgtttatttttacatatggatgtctagttgttctaataccatttgttgaaaagacaacctttactccattgaattgcctttgtacttttgccatatttgtctaggcctgtttttggactcctttttctgtttcatgatgtgtgtgtctattcctttgttaataccacatggtcttaattactgtatagtaagtcttaaaattgggtaatgctggccttataaaacgaattgggaagtttttatttttactcttatttccattttctagaagagattgtgtagaattggtgtcatttcttctttagatatttggttgaattgggaagtgatgccatctgggcctagggttttgttttttgtgtgtgagacagagtctcacttctgtcacccaggttggagtgcagtggtgagatcttggcttactgcaacctctgcctcccaggttcaagttatcctcctgcctcagcctcccaaatagctgggattacaagcgtgtgccaccatgcccgactaatttttgtatttttaatgcagacagggtttcaccatgttagccaagctggtctcgaacttgtgacctcaagtgattagcccaccttggcctcccaaagtgttaggattatagatgtgagccaccgtgcctggcaggggcctagggttttctttttcagagtattttaaactatgaattcagattatttaatagatataggactatttaagttatctgtttcttcttgagtgaatttttactgtagtttatggcctttgagtaattaattgtattgaattgtcaaatttatgagcgtgtaattatttatagcatttcgggtttgtagtggtatccctcttttattcctggtgttggcaattgtgtcttgtttttctttgtcagattgtatagggatttattagtcttttcaaagaactagcttttgttttgatttttctgttgttttgttttcaattttattgattttctgctctttattatttcttttctattatttctgcttgctttgggtttattttactcttttttttttctccaagttgcttaaagtagaaacttagatttctggtttgagacctttcttttctaagataagcatttaatactgtaaatttccttctaaccactgctttagttacacccccacaaattctggtattttgaactgagcacaaatgaaatgttctaatttcccttgaatcttattcttttaccaatgaattatttagaaatatgttatttagtttgcaagcaattggagacttttttcctgttatttttctaccatttatttctcatttcattatattatggtcagagaatatattttgaatgatttcatttattaatttttaaaaataacattaaaaaattttttaaaatgtgaatataccacatacagtataaagattgtacattctgtttttggacagttttctataaatgtcaagttgatttagttggttaatgatggtgttcagtttttctttattcttgctgatactttgtatgcagttatatcactttattactcagaagagtgttgaactttccaactacaatttttttttccaattttactttcagctctatctggttttgcttcatgtattttgaggctctgttgttaggtgtgtacacattcaggatgatatcttctgggtgaattgcctgttttatcattatgtaattccctctttatggtaattttccttgttctaagatcagaaatatctgttgtccaatttatatagacactgcagctttcatttgattagtgcttgcatggcatatctttttccatttttttacttttgatctacctttataattctatttaaagggggcttcttgtaggcagcatatagttgggtagtgttatttatttatttatttatttatttatttatttatttattgagacagagttttgctcttgttgcccaagctggagtgcagtggtgcaatcctggcttaccacaacctccacctcctgggttgcagtgattctcctgcctcagcctcccaagtagctgggattacaggcacgcgcaccatgcctggctgattttttgtatttttagtagaaacggattttcaccatgttagccaggctcgtcttgaactcctgacctcaggtgatccacctgctttggcctcccaaagtgctgggattacaggcgtgagccactgcacccggctgagtcatgttatttttaatcttttctcacaatacagggtttttgttggtaaatttaattattttaatataaattttagtataattatttacattaaatgtaactgttgcactggggtatttataatgtgtaaatataattattggtattaatataattatattactcataataatattaatatctttggatttagattaccagtttagtatatgtttttctgtttctccctctttgatttccccttttttgctttttttttttttttaattcttatttttttttagtatttgttgatcattcttgggtgtttcttggagagggggatttggcagggtcataggacaatagttgagggaaggtcagcagataaacatgtgaacaaggtctctggttttcctagacagaggaccctgcggccttctgcagtgtttgtgtccctgggtacttgagattagggagtggtgatgactcttaacgagcatgctgccttcaagcatctgtttaacaaagcacatcttgcaccacccttaatccatttaaccctgagtggtaatagcacatgtttcagagagcagggggttgggggtaaggttatagattaacagcatcccaaggcagaagaatttttcttagtacagaacaaaatggagtctcccatgtctacttctttctacacagacacagtaacaatctgatctctctttcttttccccacatttcccccttttctattcgacaaaactgccatcgtcatcatggcccgttctcaatgagctgttgggtacacctcccagacggggtggcagctgggcagaggggctcctcacttcccagatggggcagccgggcagaggcgccccccacctcccagacggggcagtggccgggcggaggcgccccccacctccctcccggatggggcggctggccgggcgggggctgaccccccacctccctcccggacggggcggctggccgggcgggggctgaccccccacctccctcccagatggggcggctggccgggcgggggctgccccccacctccctcccggacggggcggctgccgggctgaggggctcctcacttcgcagaccgggcggctgccgggcggaggggctcctcacttctcagacggggcggccgggcagagacgctcctcacctcccagatggggtggcggtcgggcagagacactcctcagttcccagacggggtcgcggccgggcagaggcgctcctcccatcccagacggggcggcggggcagaggtggtccccacatctcagacgatgggctgccgggcagagacactcctcacttcctagacgggatggcagccgggaagaggtgctcctcacttcccagacggggcggccggtcagaggggctcctcacatcccagacgatgggcggctaggcagagacgctcctcacttcccggacggggtggcggccgggcagaggctgcaatctcggcactttgggaggccaaggcaggcggctgggaagtggaggttgtagggagctgagatcacgccactgcactccagcctgggcaacattgagcattgagtgagcgagactccgtctgcaatcctggcacctcgggaggccgaggcaggcagatcactcgcggtcaggagctggagaccagcccggccaacacagcgaaaccccgtctccaccaaaaaatgcaaaaaccagtcaggtgtggcggcgtgcgcctgcaatcccaggcactctgcaggctgaggcaggagaatcaggcagggaggttgcagtgagccgagatggcggcagtacagtccagcctcggctttcacaactttggtggcatcagagggagaccggggagagggagagggagacgagggagagccccttttttgctttcttttggattatttgaatttttccttaaatttatttatcttacttatttatttatttttttgagtgattctcctgccacagctcccaagtagctgggactgcaggcatgtgccactacacccagctaatttttttgtatttttagtagagacagggtttcaccatattggccaggctggtcttgaactcttgacctcaagtgatccacctgcctcggcctcccaaagtgctgggattacaggcgtgagccaccatgccctgcctttttctagaatttatatattgagttcttgattgtatctttttatgtaggctttttagtggcttctctaggaattacaatatacatacttttcacagtgtactcacatttaatattttgtaacttcaagtggaatgtagaaaacttaaccaccataaaaatagaactagggatgaggttaaaaaagagagagaaaagaaatgtaataaagatttaataacaccgtttttttttttttttctcttttttttttgagacagagtctctctttctgttaccaggctggagtgcagtggcgtgatcttggctcactgcaacctccgcctcctgggttcaagtgtttctcctgcctcagcctactgagtagctgggattacaggtgcgcgccaccatgcccagctaatttttgtatttttagtagagacggtttcactgtgttggccaggatggtctcgatttcttgaccttgtgattcgctctcctcagcctcccaaagtgctgggattacaggcgtgagccaccgcgcccggctaagtctttaaatatttttttgacattgcactttttctcttttccttctaggattttagtaacccaaatgttagttttgttattgtttggcaggttcctgaggctttccttacttctttaaatttttttttcctgttgttcagcttcgaaaatttctattcatctgtcttcaaattcactggttctttcccgttatttccattctgttattgagtctttgtagtgaattttaaattttgtttattatgttttttagttctaaaattttctttttttgtgtatgtcttatactttgctcctgaaactcttatttgtttcaggagtgatcttatttcttagagcatggttttagtagctacttaaaatttgttttatcatcccagcatatgtgtcctcttgattgtcttttctcttgtgagataatgggattttctggttctttatatgacaattaattttggattgtatcttggacagtttgacttacgttacatgattctgaatcttgtttaaatcctgtggaaaatattgaagtttttgctttaacaagcagttgacctagttaggttcagtccacaaattctaagcagcattctgtcggctctggttccatcatcagttcagttttgtatcttatctgcttatgtgcctttctgtgtccagtctgggacctggccaatggtcaggtcccaaagcctttgtacacttttagaagcagggccatgcacacccagctcacgagtggccccgggagtgcacatacaactcgacgttttcatgggctccttcttttctgtgatgtccctgacacgttctgccttctaagaacctccctttatccctttcctgttgtctggctagaaagtcagggctttagattccctatacttcagcacacttcctgtagctatgtcaacctctgtggccacgacttcttcttcttgggactgcagtttctcttgtcagaaagtaggattcttggagctgctgtcattgctgctgtggctgctctgatgctgcctgggagtcgaaggagagaaaggaacaaaacaaaacaacccaggggatttcctccactctctttgatccgtgagagccccctttcctgttcctcagaccagaaatagagggcctgtcttggaacttcttctttgtgcatctggtgtgcagtttcagcttttgagtccaggccaggaggtgctggacaaacttgtcaggagtacggaggtactgcaagttctgattacttttctcagtccacctgcttccaagtccttggatgcatttgtccattgttttgagttgcattccatgggagagacagaagagtgtgcttatttcatcttgacatacttattaggatttcatatcaaatcaacggatgatattctctatattaatttgctgttttccctttagcaagcacattaggaaaataacactttaacacccgcctttggtggtttctgtcataattattaatacttgactttttttttttttttgagacggagtctcactctgtcctttgaggcattgtccccataaacttttggtaaagcatcaataattttatctttcatccacacaagcttcaccataaatttgatgtttattcttccattttagcagaattcatgttgctccaataggggctgtcttcaaactgatgttttctccttcttagtgcctcagagtagatcctgttcagatacgttataacaggttaatatgagtttattttggtgtaaaagtactttgaaattcatgcatagttttttcatcatatgcattttccatagctttgaacacccccatgtaactctcctcttccacaaaccaaacaatgaaaaagcacctttgtgatggaagtttattttgcaataggaactcacagtgatctaagccctgctattcatgaatataattcattactggagtccaagttgctttttggtttttgaagttctcttcttcccttgcaggtatagaacaagatgcagtgaatacttttaccaaatatatatctccagatgctgctaaaccaataccaattacagaagcaatgagaaatgacatcataggtaagcagtgcttgaaactatggcaaaaaaaaaatgacaaaaaatgcacagaactgacaattttcgttattgactaagataattttttcttaacatggaatttagcagttcccttcctaatttgttttctgagtattttttatatcggattatagctcactttaaaagtttctcggctgcattcggtgcgagggtctttgcctgggccagatgggctgcagtgtagcgggtgctcaggcctgcccgctgctgagcagccgggccggcgggcggctacgctaaccggcacagaccaccggatggactggccggcagccccgcaccagtgcacgaagtgggcgggacagaaacttctggggttggaagtccagtgaggctaaaagccggtaccaaagtctctaggcatcagggctgcagcccaagagtctcacgaccagtgggcaactggatggccagacaggtgtctcagtggtggcctctccgtctcagggcttcatcccacttctcagtgggcctgacgtccctgggcaccctggatgtctacctgcattagccagagccatcacatggcctgtgacttgcctttttttgccagttgattgtgccacacacagtgtcatttctgtgtcatttggcacagctggaggtgcaaggaggagggcagcctcatgtccagtcccagtttcacgtaactttattcttctgaataaagacaatttgctaaccttaaaaaaaaaaaaaaaaaaaaagtttttcttatatgttggacccaaattcttaggctttaacctgaataacaatgacagcaagatcaataaatagtacacatttattaaacactcactgtgtcccagacaatattccaagcactttttatggatagactcattttaacttctaaagaactttgtgggataaatacagttattttatagatgaagaaactgaagcacagagaagttaagtgctttgtccagggtaacagctcagatatggcagagtcaggatttgaaactagaccctcacataccttaactgctgtgctgtggcagtgtttttcatactgtaggttgggaccagccttctcttatgccctcaccccctgccaaaaaaaaaaaaaaaaaaaaaaaatatatatatatatatatatatatatatatatatatataatatatatatatataaaatatatatatatataaaatatatgtattagtatatatgcatatatagtatatattatatattagtatatatactaatatataatatacatattagtgtgtgtatatatatatatactagaataaaaaaatcaaagtatctcagagtagtaaggacaaacatttcagaaaaatgttttcattatatatacatgtatgtatgtgtatgctgattcaacaaatatatttcttataggttatagcaaaatagtttgaaagcttttactgtgttttatcaggaagaccttaggtgaacgtatattcacagataaaagaggttatttattcattcaataaatattacattctcataagtcctaatattatgtatttttattcttcaaaaaagttagtatttgtgatttatgaaataagacatgttcttgcacttttagcagatctgtcccgatgttgggcttctttaatccttagtgtgggtgctttgcactcactcactgctggggacagcaagacccctgttagtctcagctgtgtttcttaaattggcccactgtaccttccagttagctattctggggtccatgtcatgttggctccattttccttttctttctcccacacagatacctataacggctataacataggcctggtggctgttggtggcttatccctatctgcttgtatttaaggggtactgtttcactgagttttgctgacagatgttgtcatgagatttgaggttttctgtgttgttgctctatttttatgtgggaatttgctactatcatcatccctagaccagcttttcctagtaatacaacagggatgttctgactgattagagtttgcctgtttgaagaattggttggctagtgatttttttttgaggggagtctgtaccagttaatagcctgactggcgtgtggataaaaaggaagcagtttcaagtcaaataaaacacttaaaatgaaaccacactgcaactctctttcttttacttaagcttaatcaaattaatgatgatgtaatcccatgaaggaaaagtcttctgaaggatcaagttgataacattttgtgatcaaagaatttgagaaaacctctatcccagtgtctatcattatatattttaggatgttaattacctgtgtggctttaggcaagtcatttttcctccttgagccccattcttaatcctgtccaaattatttgtctcctcttgcagttggactattttaatatagctgtccttcaagtgagttttgttcaaaggagccttcactttagctcttactgtgtacccactttgcatagtcttgttttaaatgtaatccttggatttttggtgttgctaactaattactgtttttatgtgaggatttagagtgatccagaatctatacttgcactacctccttcatcttccacaaatgtttgaagtggtagaatttttaaaaactttgaaggtacagctgacagaatttgctgatggtttggaagtgagtggtatgagagggaaaaaaaggaataaagcatgactgcattttttgtttgtttgtttgtttgtttttgagacggagtctcactctcgccaggctggagtgcagtggcgtgatcttggctcacggcaacctccgcctcctgggttcaagcgattcccctgcctcagcctcccaagtagctgggactacaggcgctcgccaccacgcctggctaatttttttttttgtattttagtagaaacggggtttcaccgtgttggccaggatggtctccatctcctgacctcatgatctactcaccttggcctcccaaagtgctgaggttacaggcatatatataagcatataaagtgtgttatagcatacaaacaggtatatatataaacatgcagtccacacagctgataggaatgaggcagtagtgaaggagaagttgatgtaggagaggggacagttgttacaggaaagaagtctggaggcagaagggatgaattccagtgctcacatagaagattgcttagatgggagcaaggacaatttatctagagtcacaggaaagaatgcagtacacgggtagagatgcaggtgagttgaaagatgtgagagatgatggaaataattttctgattgcttctatattctcaaggaagcaggaagcaaagtcctcagcaaagagaatagaagaggtgttaaatatttgagaaaggagatgtactgtagaaaaaaaaaaaactcagtttctccttctgaactctcacaaaacagaacccttccatgactctagttgtgtggggttttttccctgtcagctaccaattctgcagatgattgttcagtgaacaccaactgggtgtcctctaagtcagttcagttctcacactgtttacctggagatagcatcagatcccacagattgaggactctgtcccacaagactgcctccacttcagatgccagtctcaagtacaagttgtggcctgtgcttctgactgaccttctataaattggagttcccacagtcccctccttgggttcaataaatttgctagagcagctctcagaactcagggaaatgctttacatatatttacccatttattataaaggatattacaaaggatacagattgaacaggcagatggaagagatgcatgggcaaggtatgggagaggggcacagagcttccatgcactctccaggtcatgccaccctccaagaacctctacagatttagctattcagaagcccccctccccattctgtccttttgggttttttgtggagacttcattatataggcatgattgatcattggctattggtgatcagctcaaccttcagccccctcatcccgggaggttggtgggtagggctgaaagtcccaaacgtgtaattctgccttggtctttctggtgattagccctcatcctaaagctctttagaggccacagccacaagtcatctcattagccttcaaaagaatccagagattccatgaattttaggcgctgtatgctaagaaactggctaaaggccagttgcaatgtctcaggcctgtaatcccagcactttgggaggctgaggcaggaggatcgtttcaggccatgagatcaaaaccagcctggtcaacatagtgagacccccttacaaaaaatttaaaaattggccaggcgtaatagctcttgtctgtagtctcagctactcagaaggctgaggatcactgagccctggagttgaaggcagcagtgagccatgatcgtgccactgactccggcttgggtgacaaagtgagaccttgtctcagaagaaaaaggaaaaaaaaaaaactgggcaaagactaaataacatatttcacagtatcacagatttgtattgtctaggaaagtgaatgtaaacagaccaggacactagtatgatcccttggtttcatgaaggtcccactaaagtcatgaacacaaagtgagactaggcatcatgttatatggtttttccagccatgtttaacagctagctaaatagctaattgtttcgctgcagtttattttagcagttccttattttagcacatttcatgttttaaaatttctaccaataacattttaataaacttttttacagataacttcacaaatccataattttttaagttacaatcccagaaatagaattgctcattgaaagggtatgttcatttttaaagttatgctagaaactgccaaattgccttcagaaaaaggtgtttgtatccccactaacactagtgttagttttcttgtgcccttgctcaagtatacatattattaaaaacaatgttgggccagtttactagataaaaggtgtagtgcctccttattctaatctatttgattactagtgagtatgtatgtcttttcacgttggtcattttatgtttgttcctttgtggattgtcatgtcctttgctcatttttcttttggaacatttcttagtagtttataagagctcttggtattttaatgatagtaaccttttaactgtcatgcatgctgcaaatcttttttctgtttgtttgcctttgtattttgtttttggagggtttctatgtataggaattaaattttatgttgttaaatcttttgatttctgcttttgcatatgtacttcaaaagactttctattttaagatcaagtgttacctgtattttcttttagttctatttaaaacctcttaatttatatgcctgtgctgttaactcccaagttgattcacaagtgtgtatacatagtttgaatttagtggcaatttaattatttacaacttcttttgcagcaaggatttgtggagaagatggacaggtggatcccaactgtttcgttttggcacagtccatagtctttagtgcaatggagcaagagtaagttagttcatattttcacattgtgcatcctagggaatttgggttcattgttaggaatgggcttcactcagctaaaaacaaagtatttttgagaatttaaatattttggatatttacaagatcatataaagcatactctatcttggttaacagtttcttttaaatataaattatgtgaactcttaaaattttcattttcattttcaatgttaatatttcctaagttaaaataatttgtttttagttctgaaataatttggggagtgattgagtctgtagtgattatgactattagaattggtttatttatttaaataatgcatgtcttcagatggctctcctaatttgttagttaggctttaagctaaatggatgctatataactaaatccacatagatttgttgaaatggctccagaggttttttagatttattactgctatgtgcccttaaaaaaaatctattcattctttcacttaacatttatcagaagagtgctctgtgtaagacgtggttaggcatagtgccagtcttgaaggaagttacagcctaataaaagacatagggcatgttgtttggttactgtaatatgaagtggcatgtgttaaatgtcaggggagaactacaaagtcataaaaaggtgggagagattacatacaggtaaaggaatcaggaatgacaccatggggagtaaggtagtgttgacctaggcctttaagatacaatagggacagtatggaaagagtatatttttcccacttaaactctttccttggtcgttccctcaaattttcccttttgtccatgtgcaggcactttagtgagtttctgcgaagtcaccatttctgtaaataccagattgaagtgctgaccagtggaactgtttacctggctgacattctcttctgtgagtcagccctcttttatttctctgaggtaaagtctgcatttcttttcacactctattcgagcattccagcctctaactatcaatgctggggccctgtctataggaaataacacagaagagccaagtcatttccaaaaagatgtatcattgtttcaagttgtttctgatggcaagagtaatttaataatatattagagagaacatgaaaattcaatgtattaaataactctaattttgagaaacctaattaaactactgcatgtaagagagtgcatgtttttaattatttggagctattttaaaaccacagaatttgaaacttgcttccagtgcataaattgcagaccagacttcagaagagaaaaaaagtagtaaattttttcttatgctcatcatttttactttagtcacttgataggattgcccagtgaagaagcatttgcaacagacaatgagtatattaatctttttgaggcatacagtttagtataatgctctttgttaggcttcaacaagtgaaattattttgttggaaagcaaatgactattaagtagaaagaggattcccagtctcacaaagcagtaatttagacactcgattctgcctctttacaagaatacaggtactcagttgatttgttttctcactccctttctttgctataagtttaaatcaacaatttgtttaggttaatatgtcctcatggaatggtggaaatgatcagatataaaatatttggtttggttagtttactctttatatgtttgctggcaaggaaccacaaatccagtttagtataatttttactctagttcactaaaagtttgcatccagctgtgtaggtagtgtttgtttcttgttaacttttttttcgtctaaaagaatactttaaaacttttcaatctcaaatgactgtaacttgctgacaggtgttaacagaagaagtagatctttttgttttttgcttatgacctgtattttaatatttgagcttatagattagagattgtgagagaaatctgtttatagtcttattttcccttgtgtattttttcttcctagtacatggaaaaagaggatgcagtgaatatcttacaattctggttggcagcagataacttccagtctcagcttgctgccaaaaagggccaatatgatggacaggaggcacagaatgatgccatgattttatatgacaagtgagttatattgatagatggattcagcagatacttattgaacatttgatatgttttgtggaaataaagatgaataaactcagtctctgttgtcaaggagctcacaggaggcagcataaaagctgcttttatatggtgtttgtaaagctttgggggttcttagaacaaaagtttctgctgggaaaggggaggtgtatgtggggtaaacaggatggcaatggtggtgttcaaggagtgtttcccagaagagagattttgtttggatcccaaagaaagaagggaattttgctacccagagaaggcagaaaacaacattctaggcaaaggcattggcccagaagccatggaaacgtaggggaaagtggcactttcaagaaacttgagtttagataatcaaaggagtggggaataaatatgaggatgctggtactaattggaatagattgtaagggaccttgaatgcctatttatgggtatattatactttctgtataaatctgctcaggcacgttgttaattagttttttattagttttcactgaaaatgagaggatggaaacatcatacagtaaacaaaattgaaaatatctggtcaggcagatgatgagcttgtggccagctctgtaacgtatggtattcttttcatttaacttttcttactctgtaaaaaaagtaattcgtggtcgggcacggtggctcactcctgtaatcacaacactttgagaggcagaggcaggtgaatcgcttgagcccaggaatttgagaccagcctgggcaacatggcaaaacccgcctttactaaaaatacaaaaattagctgagcgtgatggcgtgcgcctgttgtcctagctacttaggggcctgaggcagaaggatcacctgagccttgggaggtcgaggctgcagtgagctgtgatccactgtactccaccctgggcagggcagtagagtgagaccctgtctccaaaaaaaaaaaaaacaacaaaggtaatttgttatttgtatccttaagcaaatgctaaaggggtaacttggggatagagaaaagtccacagatgttagggtttgaagacactaatagtatctaggccagtggttcctgaacattagtctgtgggctcttgctgggctgtctgcataggaatcacctgagagcttattaaaaataggttttcaggctggttgcggtggctcacgcctataatcccagcactttgggaggctgaggcaggcggattacttgaggtcaggcgttcaagaccagcctggccaacatggtaaaaccccgtctctactaaaaatacaagaattagccaggcatgatggcacacacctgtaatcccagctactcaggaggctgaggaaggagaattgctcgagcccgggaggtggaggttgcagtgagcggagatcatgccactgcactccaggctggctgacagagggagactctgtctcagaaaaaaaaaaaaaaataggttttcagtctgggtaccggtggctcacacctgtaatcccagcactttgggaggccaaggcaggcagatcacttgaggtcaggagtttgagaactgcctggccaacatagtgaaaccttgtctctactagaaactacaaaaaattaactgggcattttgacgggtgcctataatcccagctactagggaggctgaggcaggagaattgcttgaacccgggaggcagaggactgcatctcaaaaaaaaaaaaaaaaaaaaggtttccagtccccctgtctcagaaattctgattctgcaggtttgaggtgtgaccaggaatctttatttttagaagacataccagataattctgataaatagccagtttagggatgtagtctaattttcctattttgcaagtaaggaaaataaggcccagagaggtaatgattttctcaaagtcacagaacaagttagtggcagaatttggactggaatgcagttcttaatgttctgtccagtgtttattctggtacagtatgtttgtagaaggtattacgtaagaaacattgttatatagatgttgagataggaagagtttacatttagaaatttggtctaaaatgcctgaacattcaagtcgtggaggagtattgaccaacttactcaatacaacataggagattcacattttgttacaaaaatgctgatttaaaaggagagttttcttttttttcttcttttttattttttgagatggagtcttgctctgtcacccaggctagagtgcagtgacacgatctcagctcactgcaacctccacctcctgggttcaagcggttctcctgcctcagcctcctgagtagctgggattacaggtgggggccaccacgcccagctaatttttgtatttttagtagagacagggtttcaccatgttggccaggccggtcttgaactcctgacctcaagtgatccacccaccactgcctcccaaagtgctgggattataggcgtgagccactgtgcccagcctgcttgtttttgtatcatatatatgcatcatcataatcatgcattatcaacctttgtatttctgtcaggacatagaaaccattagagtgcttggaagagagcctttttttttttctcgcatttaatgctttttttggtattcatttcataatcagcttaccaaaacattacctgcattataccccatcaaggtagaaatctttgtgttatcaatattggttactccctttccacaccgagtcatcagtaagtcctgttctatccaaataggtcatatgcatctagctcacccctcagtgctgttttgttttgaatttgtacatgtttactcctgatgccttgtagttatgatgatgtgttcttattttattctgtgcatacaagttctcagctcgctttttagggaaaatgaccatgtcttcctttcctataaattcctttctatctatcaagtcctcaacagagaataggtacccataaatatgtgattgttagtttctttgcctcagttgtagtctgatccttacagcttttaaacaacagtagagttcaccgtcaagaactaaggatggttggcaggcagatagaaaggtagcaagttgacccaactatctctggggaagtgggaacaaagaaaggttacatcagcactgtcatcacatagctctatagttctaggcctgcaggctcaatcaagtagccttgtataagattctctggaggaggtgctgaaagttgcttatacttgctatggaatttgattttacttcggatatctttttaccataggtacttctccctccaagccacacatcctcttggatttgatgatgttgtacgattagaaattgaatccaatatctgcagggaaggtgggccactccccaactgtttcacaactccattacgtcaggcctggacaaccatggagaaggtaacccagaacttcaaacgtatcaaactacaagaagttttattggtagaactcataaaatataaggtgggaaaaccaagcagaatagcacagtggaaattgaagcagtccagcaaagtgattaagagcagaggccttgagtctggcctggtatgtacagtcacgtgccacataacattttagtcaacagtggactgcgtgtacgatggtcctgtacgattataatggatcaaagctggtagtgcaataataacaaaagttagaaaaaataaattttaataagtaaaaaagaaaaaagaaaaactaaaaagataaaagaataaccaagaacaaaacaaaaaaaattataatggagctgaaaaatctctgttgcctcatatttactgtactatacttttaatcattattttagagtgctccttctacttactaagaaaacagttaactgtaaaacagcttcagacaggtccttcaggaggtttccagaaggaggcattgttatcaaaggagatgacggctccatgcgtgttactgcccctgaagaccttccagtgggacaagatgtggaggtgaaagaaagtgttattgatgatcctgaccctgtgtaggcttaggctaatgtgggtgtttgtcttagtttttaacaaacaaatttaaaaagaaaaaaaaaattaaaaatagaaaaaagcttataaaataaggatataatgaaaatatttttgtacagctgtatatgtttgtgttttaagctgttatgacaacagagtcaaaaagctaaaaaaagtaaaacagttaaaaagttacagtaagctaatttattattaaagaaaaaaattttaaataaatttagtgtagcctaagtgtacagtgtaagtctacagtagtgtacaataatgtgctaggccttcacattcacttaccactcactcgctgactcacccagagcaacttccagtcttgcaagctccattcatggtaagtgccctatacagatgtaccattttttatcttttatactgtatttttactgtgccttttctgtatttgtgtttaaatacacaaattcttaccattgcaatagtggcctacgatattcattatagtaacatgtgatacaggtttgtagcccaaaagcaataggttgtaccatatagccaaggggtgtagtaggccataccatctaggtttgtataagtacactctgtgatgttagcacaatggcaagcagcctaacggaaattctgtttattgattgattgattgattgattgattgagacagagtttcactccattgtccaggctggagtgcagttgcacagtcttggcacactgcaacttctgcctcccaggttcaaccaattatcctgcctcatcctcccaagtagctgggattacaggcaggcaccaccatacctggctaatttttgtattttagtagagacagggtttcaccattttggccaggctgttctcgaactcctgaccttaagtgatctgcctgctttggcctccgaaagtgctgggattacaggcatgagctaccatgcctgggcagtaactgaaattctctaatgccattttccttatctgtaaagtgacgataatatgcacgtttacctcaaagttactttgatgattaaagtaaggtaatgtatataaaatacatattaacatagtacctgacacatggtaagcatcaaaaaatgttaactacttttattactattattattacgtatttttaaataattagagagcagtatcaaaaattagctgggcgtagtggcatgcacctatagttccagctactcaggaggctgaagctggaggattgcatgagcctgggaattaaaggctgcagtgagccgtgttcatgcccctgcactccagccttggtgacagagcaagaccctgtcttgaacaattaaagaaggcattatgccgcaacgttagcttagaaatgatccacatatatcaccagtaactgtcaacaggattggaaccctagttttgggtattatgatcacaaggtattattaatagcttattaataataaagcgttggctaggcacggcgactcacatctgtaatcccagcactttgggaggccgaggtgggtggatcacctgaggtcaggagtttgagaccagcctgaccaacatggagaaaccccatctctactaaaaatacaaaattagccgggcgtggtggtgcatgcctgtaatcccagctacttaggaggctgaggcaggaaaatctcttgaacccgggaggcagaggttgcagtgagctgagatcgcaccattgcactccagcctgggcaacaagagcaaaactccgtctcaaaaatataattataataaataaataaaagtaaagtattgatgtttgtgaatgatttattcttctaatgaactagaggagatttttccaggaatttcagagccagtgaggttatgttgcttgtatgtgtcatgtgtatccaggtgaaaaaacttaattaaacgctattatataataccatacataaaaactgaattttaggaatactgaagaatgacatatagaagtcaaatcattaaatagctagtagtaaacagaatagagtgtcagctgttacccaatgatgataatattttcacgattaaaattaaaccttttctgattttaaaggaaaagttcagatctgtatcatataaagaatgtaaattttcagggtaataaaattaaaatgcagagagaaaaatgcaaaaatagttcttactagatgtgtgtatgtaaggaacttagactaattttaagaacactgtcaagaccctggtagttaggtaggaaaaaagacatgaatgattcattcaacaaaaactttgagtatttctgtgctagatggtagtgttacagtggtaaacaaaataaatgtgtttctgctatcctggagcttagtctacaaaaaaggtacatattggccgggcacggtggctcacgcctgtaatcctagcactttggaagatcgaggcgggtggatcacctgaggtcaggagttcaagaccagcttggccaacatggcgaaaccccgtctctactaaaaatacaaaaattaactgggtgtggtggcggacacctgtaatcccagctactcgggaggctgaggcaggagaatcacttgaacctgggagacagaggttccagtgagtcgagatcatgccactgcattccagcccgggggacaaaagcgaaaatacgtctcaaaaaaacaaaaacaaacaacaaaggcacgtattaaatacgaacataaatatttacaaattatactgaataagttctcatgtttattatttgcttgtccagttacaaacttttccttcgtagaattagaaatataaataataaacatgagaactcattcagtataattaataattattaaatgtaaataaaaacatctatgtacaattaggcatttatttaagaattatttgaaaaaaaaacaatgtggaaacagatattttgatatattgctagtgattgaaattgataatgttcttttgaagagtaaagtgaccatatatattaaagttaaaatttaactcagcaatcacacgcctggtgagttatcttaaggaaatcagtttgaaagtaaaatcaatatatgcacaaagactttaacatttatcataaaccagaaaaatcgagtttcaaattatatcctatggactattttctgctaaaaagtattaatatcaactttatgtaatactttcgtgacaaatattttgggggagaaaacccaacaaaattacatgcattgtaattttttttttttttttttttttagacagtcttgctccagcgtccaggctggagtgcagtggtgcaatctcggctcactgcaacctccatctcccaggttcaagcaattctcctgcctcaggcctcccgagtagctgggattacaggcgctcaccaccatgcctagctaatttttatagtttttagtagagatggggtttcatcatgttggccaggctggtcttgaactcctggtctcaagtgatccgtctgcctcggcctcctagagtgctgagattacaggtgtaagccactgcacccagccttatgcattataattttaatttgtaaactgtacaaagggataatacttgtagtacaacaagaagtaaaaacatttgttataggtagttaacatttgtaaccagtagaattataggtaaaatttatttatttaaaacagttttagttggatttgatttcaactttaaaataatgcttttcatctctatcaggtctttttgcctggctttttgtccagcaatctttattataaatatttgaatgatctcatccattcggttcgaggagatgaatttctgggcgggaacgtgtcgctgactgctcctggctctgttggccctcctgatgagtctcacccagggagttctgacagctctgcgtctcaggtattgactgattgcgtctgccattagggagaaaagcatacacatcctttccttcacatcccagtaacagatcctattatttgtaaattttaagttgtggaaaaaaaagataaaagccaggcacagtggcctgtgcctgtaatcccagcactttgggaggctgcggtgggcggatcacacgaggtcaggaattcgagaccagcctggccgacatggtgaaaccccatctctactaaaaatacaaaaattagccgggcatggtggcaggcacctgtaatcctagctacttgggaggctgaggcaggagaatcgcttgaacccaggaggcagaggttgcaatgaaccaaaatcacgccactgcactccagcctgggtgacaaagtgagactgtgtctcaaaaaaaaaaaaaaaagagagaaataaaattagcctacttactatcttctaatcaaagcatttgtggtaacttaaaatatactgtattgtaaagtatcatgctgtttcatttaggccattattctatttgaatctgtggctgtttctcttaataaatcaagtaatatggaatatattcatagcctctgaagagctctttatgtaagtatttatttaggatactttttgtaaaataagtgaatgaattcttaggtctcctttttttttcttttcttgagacagggtctcctcgctgcaacctggaaattctgggctcaaataatccacccaccacagcctcctgaatagctgggactagaggcatgcaccaccacgcctggctaatttgaaatttttttttggccaggcatgatggttcacgcctgtaatcccagcactttgggagaccgaggcaggcagatcacgaggtcgggagatggagaccagcctggccaacgtggtgaaaccccgtctctactaaaaatacaaaaattagctggttatggtggctcatgcctgtaatcccagctacttgggaggctgaggcaggagaatggcttcaaccagggagtcggaggttgcagtgagccgagatcacgccactgcactcctgcatggtgacagagtgagactccatctcaaaaaaaattttttttttaaatgatggagtcttgctgtgttgctcaggctggtcttgaacccctgacctcaaatgccgcctgcttcagcctaagtttcttttttttttgtaaagagacagggtcttgctatgttggccagggtagtctcaaactcctggcttcaagcagtcctcccaccttggcctctcaaagtgctgggattacaggcgtgaaccactacctataatgttgtgtttcactcaaggccttttgatttcgttttgcattaccgtgccacattgtgcatttccttgaccttttttgggttttttggagtgctttcatatgttaaaccatacctgattctcctcaaaatcacacaaagtagaatatcctaagacaagaaatctaaggaggcataaagaagttaactggttttattaaactcacacagtaaatgatagagccagaaatattccccttctagtgttcttcaccatcagcttaatgtagcataataattttctaattactgttgacaaataaataaccctttgaattttcaatactgggccttggataaattttcctaatttgtaagagagtattatcgtattgccatttacaaagctctcctgagtatctttttcttctgttaagtttacctaggagataaactgctgagtatggttgccattttggttttttgatataggttagaatgtcttggttttttttttttttttttttggtttttgttgttgtcattgtttgagacagcatcttgctctgtcgcccaggctggagtgcaatggcacgatcgtggctcactgcaacctccacctcccgggttcaagcaattctcctgcctcagcttcctgagtagctgggattacaggcatgtgcaaccacacctggctaatttttgtgtttttagtagagaaggggtttcaccatgttggtcaggctggtattgaactgctgacctcatgatccacctgcctcggcctcccaaagtgctgggattgcaggcatgagccactgcacctggctgaatgtcttgtttttgattaggcacttaagaaaggcctaggtactaaccataaaatatatttttataccttttgttgatactatatatatagaaaactgcacttatcataaccttagacaccttgaagaatgttcacaagcagaactaacccatgtgacccagcatccagatcaaaaacagcattatcagcccctctagaagccctcttgggccccttccattcactgtccttcttgtcaccagggtagctactatcctgacttttgatggcatagattagcattacctgttcttgtcattttataaataaaaccatactgtgtattcttttcttgtacagctttattgtgctaattcacatttacatcatacaattcagtggtttttatatggtcacagagttaggtaaccattaccacatcgattttagaacatttttttcactccagatagaaaccccctttacttaaactccaaatcccccactccaccagccctaggcagccactagtctactttttatctctatagagacaatagatttgcttattctggacatttcataaacatggaaccgtatattatgtggtcttttgttgccaactgtctttcacttagcatcatgtgttcaaaagagcatcatgttatccatgtttggcatgtatcagaattttattcctcattatggccaaatatcccattgcaaggatttatgacattttatttgaattgtaccctcctttctgccatttatcaataatgctactgtgaccatttgtgtacaagtttttgtgtggatacaggttttctttttgtttttaaatttgaggtggagtcttgctctgtcgcccaggctggagtgcagtggcacaatctcggctcactgcaacctctgtctcctgggttcaagcagttctcctgcctcagcctcccgagtatctgggactataggcacgcaccaccacgcccagctaattttttagtagagatggggtttcaccatgttggccagtctggtctcgaactcttgacctcaagtgatccacccatctcggcctcccaaagtgctgggattacaggggtgagccactatgcccggctgtggttttcatttcttttgttgtatatacataggagtagaattgctgagtcaagaggtaactcttaaacttattgaaaaactgccagattgttttccgaaaaggctgcaccattttgcaatcccaccagcagtgtatgagttttacagcttctccacatttcattggaacttattatctgtttggctgtttttaaaaatgatagtcattccaataagttctacttcagtgtggtttttgcacttctctgatgagtaatgatgttgagcatcttttcatttgcttattggcctttgttctagctttggaaaaatgtttattcaaatcctttggccatttttatttttatttttatttatttatttttttttgagaccaagtctcactctgtcagccaggctggagtacaatggtgtggtctcagctcactgcaacctccgcctcctgtgttcaagtgattctcctgcctcagcctcccgagtagctgggattacatttcaggcacctgccagcatgccgggctgatttttgtatttttactagtgacagggtttcaccatgttagccaggctggtcacaaactcctgacctcaggtgatctgcctgcctaggcttcccaaagtgctgggattacaggcgtgagccattgggcccagcctagattttcttttttctttttttttttgagaaggagtcttgctcttgttgcccaggctggagtgcaatggcacaatcttggctcactgcaacctctgcctcctgggttcaagcgattttcctgcctcagcctccccagtagctgggattacaggtgcctaccaccacacccagctaacttttgtattttttttagagacagggtttcaccatgttggccaggctggtctcaactcctgacctcaggtgatccacctgccttggcctcccgaagtgctgggattaccggcatgagctaccaggcccagccaattttctcattatattgcccaggctggtctcaaactcctgggttcaagtgatcctcctgccttggcctcccaaagtgtggggagtacaggcgtgagccaccttgctcagcccctttgcccatttttaaattagattgcctttttatattgagtttcaggagtcctttatatattctagataaatgtcccttatcaaattatattatttccaggtattttcttcattctgtgagttgtctttcctctaccttttaaaaaaggtgggtttttgtttgtttgtttgtttgtttttttaagataaggtctcattctgctgcccaggctggagtgcagtggcacaatcacagctcactgccacctcaacttcctgggccgaagtgatcctcttacttcagcctcctgaatagctagggccatagatacacactatcacacccagctttttttttctgtttgtagagacagatcttactgtgttgcccaagttggtctcaaactctaggctcaaagtgattctcccacctctgcctcccagagtgctgggattacaggtgtgagccacacgcaacctgtcttttcactattaatagtgtcttcctgcttcagcctcccgagtagctgggattacaggcacccaccaccatgcctggctaatttttttgcatttttagtagagacagtgtttcaccatgttcacccggctggtcttgaactcctgacctcaggtgattcacctgccatggcctcccaaagtgctgggattacaggcgtgagccactgcacccggccaaaatattgccttcttaacagtattgtcttctaatttgtgaacatggatgtatcttcatgtatttatgtgttctttcatttcagcagaattttgtagttttcagagtagaagcctttcacctccttgggtcatttattcctatgttttaagttcttttcgattccattataaatagaattgttttcttaatttcattttcagattgtttgatgagagagcatagaaatacaagtgatttttacatgttgatcttgcaacttcaactttgataaatctgattgttagctctaatagttttcttgtggattctttaggattttcaatatataagatcatgtcatttatggatagagatagttttttttctggctagaacttacagagcaatgatgagtagaagtggcagaagcaaaaatctttgtcttgtttcctatctgacagggaaagctttcagtttcatcatttaatatgatgttaggtgtgggttttcaataaatgccttttttcagattcaggaatttccctatcattcctgattttttaaggcttttttttttttttaaatcatgaaagggtgttgaatattgtcatgttctttctgtatcagtataaatgatcctatggattttgggttttattctgttgatgtgaaatattaattgattttcagatgttaaaccaaccttgcatacctgagatgaatctcacttggtcatggtgtataatcttttcaatatgctgctggattccatttactggtattttgttgaagattttgtatctgaacgcttaagataacatttacactctatcagaaatgaattgaccataaatgtgagagtgtatttgtgggttcttgattctcttccattccaaagatagacatacatccgtctgtatgtctgtctttatgccagtaccatactctcttgattactattgctttgtaataagttttgaaatcagaaagtataaatgagattttggtatctgagtaacagtcctcatagaattagttgggaaatattccctctttattctggtccctctttcttttttgtttaactgtgtatcttggagattgttccttctcaacacatgagagccgctttccctaccctcccacccctgctatagagaggtctataagtgtctgttcaattattttatttacttaacctattacttagtcggggacattaagcttgtttatgtcttttattttaaacaatgctgcagtgaataatcttgtatataagtcattttccatcaatataagtctctctgtaactgaatttttagaagtggaatttctaggtcaacctatggctctgtatttcacaaaaataccaattctggtttttcttgtggaggtggggagtaggaggtagaatgctggaggagaacttgctgtactcagctggctagtcattttagaaaggtttccttagcttctttttgtcatatggcctcaccaagaatcaaaaacattcctatttaccctgtaaacatggggctttactacccaagatacatatttctggatgtatgacagcttttcatattgaagaaataatgctgtgagtacagcacatttgttggaacttaggtcgttaagaatgtcttataaattcatacattatacattttattttattttattttttagtttttgatacagagtcttcctctgtcgcccaggccagcgtgcagtggtacaatcttggctcactgcgacctccatctcctgggctcaagtgattctcatgtctcagcctccagagtagctatggttacaggcatgcaccaccatgcccggctaatttttttatttttagtagaaactgggtttcaccatattgaccatgctggcctcgaactcttggcctcaagtgatcggcctgcctcagcctcccaaagtgctgggatccttgtattgggtaaaagatgaatattgagggctgcatggtggctcatacctgtaatcccagcactttctgagactgaggtgggaggagtcctggagcccaggagggtgaggctgcagtgagttgtgatcgcgccattgcacttcaacctaggaattataggcttcagtcactgtgcccggcatgtacattttaatattgtgctttcctcttttagctatagtatgaggttacatttcagagtcattgttgttaagcatcttaatagtgatgaggttgagtgaaagttacttctatttcaaacactgaagaaaattttgtacaaatctgtcacattccaagcccaggactgattgtttcatatacttctaattttacaatttctattgtagtccagtgtgaaaaaagccagtattaaaatactgaaaaattttgatgaagcgataattgtggatgcggcaagtctggatccagaatctttatatcaacggacatatgccgggtaagcttagctcatgcctagaatttttacaagtgtaaataactttgcatcttttaaattttttaattaaattttacatttttttctaatctattattatatgcccagaactttcacttagagtgtgcagtataatgtggtggttaagtataaaggctctggagtgacttcctgggttttaatcttggctctgccatttattggcagccgctaacctcttggtatctcagtttcttcatctgtaaaatgagaataataaagtgaaaagatgccaacatcatttactctgggctgcataactgatacttggaaaaagtattcctttgagtttaagaattaagttggttattcattttagcttgtaataaaaagatagtgattcataggatatgccacttactgaaatttaccacagatccaatcataaaatcactttctcttccctaaagatagcttgattaacatgtaaaggtgtgtaaaggcttgattacactaccctgatccgtaccccagttcccagcagcaccatgaaaaagggatttcaacatatttaattactttcagtagaaagtaacagtggtaggccaggcgcagtggctcacacctgtaatcccagcactttgggaggccgaggtgggcggatcacgaggtcaggagattgagaccatcctggctaacacgatgaaaccccgtctctactaaaaatacaaaaaattagccgggcatggtggcaggcacctgtagtcccagctacttgggaggctgagacaggagaatggcgtgagcccgggaggcggagcttgcagtgagcttagattgtgccactgcactccagcctgcgcagtggagcgagactcttgtctcaaaaaaaaagaaagtaacagtggtattgggagactgaggagcctagaaagtacttgaaggaagtaaaaggtttgtttgaccacattgtatttggaaagccagctttttcagctgtgtcagctttgtgtagtgatttttagttcttcttttagaaaataacggacaaggccgggcacggtggctcacgcctgtaatcccaccactttgggaggccgagacgggcggattacctgatctcaggagttcgagaccagcctgggcaacatggtgaaaccccgtctctactaaaatacaaaaagttagccgggcgtggtggcgtgtgcctgtagtcccagctactccggaggctgaggcaggagaattgcttgaacccgggaggcggaggttgcagtgagccaagatcacaccattgcactgcagcctgcgcgacagagtaagactctgtctcaaaaaataataataaaataaaaaagaatggacagtaaacctaaatgagttcattcccaaagatgatgttattcttaagggatggttcatttatttaagaccttacataaagtctatcaattgcgtgatttttcacttctgtaattgtgtgtatgtataatgtaaatatatatgtttttgttttgttttggttttttgagacggagtctcgctctgttgctcaggctggaatgcagtggtgcaatctcagctctctgcaacctctgtctcccaggttcaagcgtttcttctgcctcatcctcccaagtagctgggactacaggcacgtgccaccacgcccggctaattttttgtatttttagtagagatggggtttcaccgtgttagccaggatggtctcaatctcctgacctcgtgatccacccgccttggcttcccaaagtgttgctattacaggcatgagccaccacacccagcatgtattttttaaatgtataaaatgaagcagaaaagagaaatgataatttttcttcatcttgaaagattatcttcaccaggcgcagtggctcacacttgtaatcccagcactttgggaggcctcggcaggcggctcacttgagttcgaaaccagcctggccgacatggtgaaactccgtctctactaaaaataaataaataaagatggttttaatatatgttttagttttatgattttagcatctttctgaaatttttctcaaggcaagtaaatttgtatcagttggtatattggtacccatctatgaaataacttattaggaagatatctctaaaataagatcactttgcctaaaataaactgatatattgatgttcacagaatttttcttttaaccgacttgataaatgcattattcttgacgtcaagtgatccaccttcctcagcctcccaaagtgctgggattacacacatgagccaccgcacctggcattattcttataaaaggttaaatttctagttaagtttaatgtcctctttgttcatgtaccattgcttattttcttcccttcctactcacagtaatcattcttatggtatgcacttttgtttgcttatttttatgtaattgatattacgctccattctgtacgttgtactttcattcacagtgagttttggacattcctatgttcatctatacagacttacttcattttaactacactgtagtattccgtatgtaatatttactataactcatcactgtagcagagcatctcatagtgtatgtattactgttttgccattttggtatcaatgagtatttaagtcatttgcagtttttccctcttatacccagtattacagaggatctctttttatatgcttctttgtaccaagaggcagattaaaaaatttttttttgaaaaaatttttgaaaaaaaatgaaatgaagtctcactatgttgcccaggctggtctcaaactcctaggctcaagcaatccttccatcttggcctcccaaagtgctggggttacaggcatgagccaccatgcctggcctacattttaaattttgatagctcttacaatttactttgtaaagtatctgcatcattttatgttctcaccagtctttaataagaatacttcatacttttggctggacacagtggctcacgcctgtaatcccagcactttgggaggccgaggcgggcagatcaagagatcgagaccaccctggccaatatggtgaaaccctgtctctactaaaaatacaaaaattagctgggcgtggtggcgcacccgtagtcccagctactcgagaggctgagacaggagaatcacttgaacccgggaggtggaggttgcagtgaacttagatcacaccactgcactccagcctagcaacagagtgagactctgtctcaaaaaaaaaaaagaatacttcagacttaattttttttccagtcttaagtgtttgctaatgagattgagtttcttttggtatgtctcttgattgttcaggttttttcttttatgaattgactgttcatctctttttcacattatttctgttgggtgattttattagtgacttgttaaaattctgtatattttttcagcatgacacttcattattcaaaaaaaaaaaaagattctctatgtttctcgatactaatcattggttggtaataccttaaaaataagacccttactgtattttttgcttttttttttttttttttttttttttttttgagatagagtcttgctctgttgcccaggctggagtgcaatggtatgatctcggctctcagctcactgcaactgcaacctctacctccctgtttcaagcaattctcctgccttagcctcccaagtagctgggattacaggcatccaccaccacacccagctaatttttgtatttttagtagagacagggtttcaccatgttggccaggctggtctcaaactactggcctcaagtgatccgcctgcctcggcatcccaaagtactgggattacaggcatgagccacagtgcctagccactttttgctttttaactttgttttatagtactatagttttagtataaacagatgtatgtatacacacaactatggctttataatatgtttcagtcattgttagagcaaggcctaccttttgggtgcttcttttacaaaattgtcttggctattcttgtgccttttttcttatttgtgaattttagaattgtgaattacctgttgactcaccatgttttgtaaactgaggattttgaatggaattgcactcaattaaagattatcttgctttctgtgcagcaatgttttatttcaaataatccctactttaaattacttaggatagctataaattgtgtttctggctttctagatttagatgaaacgctttaaattgattgttttctcctaaatttaaaactgattgttagaagttaaagtcttctgttcattcttatttaggaagatgacatttggaagagtcagtgacttggggcaattcatccgagaatctgagcctgaacctgatgtaaggaaatcaaaaggtttgtggtgtttttatacttcatattaagcctttactcacattagtgattgactgtaagtcaaagaccacttaaggtttaaactgtttattttgtaaagtaaccactgtatctttcaccttgtgtttatagtcagaagtaagtacaagggcttcctgtagtcacatctttatgcaatctcctctgaatcaaaagttagtgaacttgctttgccactccagaaggcacatgaatatgaaaaagcattgtctattttcttatttaatggcaaaatacccgacctaagttggacttaatgtttgagaccgtttattttattaaattatattttttctcttttcttttttttttttgagacagttcttgctctgtcacccagaccggagtgcagtggtctgaccgcacctcactgcaacctctgcttcctaggttcaagcgattttcctgcctcatcctcctgagtagctgggactacaagtgcgcaccaccacacctggctaatttttgtatttttagcagagatgaggtttcaccacgttggctaggctggtctcatactcctgacctcaagcaatccatccgccttggcttcccaaagtgctgggattacaagtgtgagccaccatgcctggccttattaaattatttttattaaatttcctcaagattgatgaaagtaatgaaatataaaagtaatgaaatatatgtggaaaatagactggattaagaaaatgtggcacatatacaccatggatactatgcagccataaaaaaggatgagttcatgtcctttgtagggacatggatgaagctggaaaccatcattctgagcaaactgtctcaaggatagaaaaccaaacaccgcatgctctcactcataggtgggaattgaacaatgagaacacttggacacagggtggggaacatcacacgctggggcctgtcgtggggtggggggctgggggaggaatagcattaggagatatacctaatataaatgacgagttaatgggtgcagcacaccaacatggtacatgtatacatatgtaacaaagctgcacgttgtgcacatgtaccctagaacttaaagtataataaatttaaaaaaaataaatatatgtggaaaatattaataggtcaaaattcaaattgttcatttaatcagaagagtagtttagtcaaatccaagggttagacaacagaaatcttttttgtcaagtgcattctttgtgactgatttcattttcttcctggtttacacaggaagatttcagaaacaaatgtggatccgtgacagatggtatctagaagtttttagtttggttgaattgacagtattttattgagtaaaagatactaatttttgtaagaagaaaaattcaattttgataagtatgtttaagattaagagctattggccaggcgctgtggctcatgcctgtaatcctagcactttgggaagctggagcaggtgggtcacgaggtcaagagattgagaccatcctggccaacatggtgaaaccctgtctctactaaattagccaggcgtggtggcacatgcctgtgcacccgcctccgggtttaagcgatcctactgcctcaggctcctgagtagctgggattacaggcgccatggctaatttttgcatttttagtagagacagggtttcactacattggccaggctggtctggtctcaaactcctgacctcaggtgatctgcccgccttagcctcccaaagtgctgggattacaggcatgattcaccatgtctggccatttatcttattttcttttttttttttttttttgtttgagacggagtcttgctgtgtcgcccagagctggagtgcaatggtgcgatctcagctcactgcaacctctgcctcctgggttcaagcaattctcctgcctcagtcttccaagtagctgggattacaggcgcgtgccaccacatctagctaatttttgtatttttagtagagacagggtttcaccatgttggccaggctggtctcggaactcctgacctcgtaatctgcccacctcggcctcccaaagtgctgagattacaagtgtgagccactgtgcccagccatcttattttctttctttttttttgtcgggtgggagggggacagagtctagctctgtcgccaggcttggctcactgcaacctctgccccccaggttctagcaattattctgcctcagcctcccaagtagctgggattataggcacctgccaccacgcctggctaattttttgttatttttagtagagatggggttttgctatgttgaccatgctggcctcaagtgatccgcccaccttggcctcccaaagtactgggcttacaggcgtgagcttgtattgggtaaaagaacaatattgggggctgcatggtggttcatacctgtaatctgagcactttgtgagactgagatggaaggagtgttggagcccaggagggtgaggctgcggctgcagtgaattgtgatcacgccattgcacttccacctaggtaatggagcaagaccatgtctctaaaaaacaaaacacaatttttttaaggaatactgggaagaggtcagtggtggttttagaacagaggaagtgccagatgacctttgtgaggcattggccaggaagaactctacagtgtctttaggtagcttctgtccataaggataatggggtctcctccccagtattaatagaaaatctctgagctgtttttttttgtttgtttgttttgtttttttttcctgagatggagtctctctctgtcggccaggctggagtgctgtggcgcgatcttggctcactgcaagctctgcctcccaggttcacaccattctcctgcctcagcctcccaagtagctgggactacaggtgtccaccaccacgcccagctaattttttgttatttttagtagagatggggtttcaccatgtcagccaggatggtctcgatctcctgacctcgtgatccgctcgcctctgccttgcaaagtgctggagttacaggcgtgagccaccgtgcctggcctggtttttttgttgttgttatttatttatttatttatttattttttgagacagactctcgctctgtcgcccgggctggagtgtagtggcacgatgtcggctcactgcaagctctgcctgccaggttcaagccattctcctgcctcagcctcctgagtagcagggaccacaggcgctcgccaccacgcccggctaattttttgtatttttagaagagacggggtttcaccgcattagccaggatggtctcgatctcctgatgtcgtgatccgcccacctcggcctcccaaagtgctgggattacaggtgtgagccaccgtgcctggcctgatttttttttttttttaatctggtctcatacctctgacagctcatgaagaagtgctcctgcttcatatgtatatgtgttagcatagtgttaacatagcataggtgttcggtgtttgcagtttctgtttgttttatatgaattaaggtgtattatgagcagttgaagatatataggaaattttttcccaaaccactatctctgctcgttctattcattcagtctgtttatgttattccttcattcattcattttatagaacagtggagtgcctactgtatgcatctattgttctgggtcctggggaagaaaacaaagttcctgctttcatggaacttacattatattggcggagacagtaacagacaaacaaatgtagcctgtgtacatgtgttacatgaaaagcagggtagggggctgggagagagtagtagggagtgctattttcgaggtggttgtcaggaaaggcctcactgaggaggtggcattttgagtagacctgagcgcagcgggggcgtaagcccaggcagcatgtggaggaagagtgttcttggtgaaaggaacaaggatagaggcccgaagctagagagctcagcatgatcaaggaacagcaagccccgtgtggctggaatggagtgagcaaaggaatgagcagtagaaggtgagtgagttgggaggtcaccagagaccatggcaaggacttgaaagtgtcagggacacattggaagttggagcagggaaatgatgggatttatgttttgtttttgttttatgtttagtgtttttaagggattgctctatcagctatttggaaaatttagtgtagggcttcaagaagagaagcagagaaacaacattcttgccatagtcatagtctaagtaagggatgatggtggtgtggattaggctggtagtggaagaccagtccagttcgggttgtatttgaaggtagaggcaaaaagattatatttctaccagcaagcccatctatgaagttacttgtattattaatttaattgagacatgcccacataaactaataaataggaatttctgcagtttggttaaacacccctgtatatcctggttcttcttttagttgtccagatgtctctttaagtcaagtattttttggtggtgtaggagcctagagattgaatttattcacccaaaaggcatttgagtgattactatgtgccaggcactatgctgaatgccaaggatgtaaataagagggcgtagtctcagtctgttttactccagcttggttcctttttaatgaccctgacttgttaagcatatcagttatcctacagaatgtttaatcttctgtactttcctggttgtgttatttagcttatttctctttccttgacatttcttgtaaactggaagttacacctatagtcttgatgattcgtgttacacattttagattagaacacatcatgtgttgtatatggtgtttttgaaagcctctctgtatattggtctgtacattaaaatgttgcctgaatggatacacataaaatttaacagtgattacattagagatgagaagaaagaggtgccttttacttttcaatataccttttcctctgctttttgaactttcttgccctatgcatacgttattgcttaatcatccacctcatctcttcccctgtggctttctgttgcatttggaatgaaatctagcctctttgctgttacctgtggatgtcccttgctggcctctatcaccttactttgaaccactcctttcatggactgagctctcattggactatcttttattcttttgctgaagtttcttcactttgagtgcctctgcagttgctatttcatggctgtggcaagccctgccatggctttcatgcaaggatggttcctccttctcatctcaatattatctcttcagagagggaccttcccaactccgatgatctaaaatcctttgtatataccactcactaccacttctttcttttcttttccttttatcttttttttttttttttttttttgagatagggtcttgctctgttgcccaggctggaatcacgactcactgcagcctcatcttcttgggctcaaatgatcctctcacctcagcctctcgagtagctggaactgcaggcacacaccaccatacttggcttattattttactttttgtagagacagggtttcaccaaggctggtctcaagctcctgccgcaagcaatccacatctctcagcctcccaaagtattgggattataggagtgagccactactcctggcctattttcttattcactgtctaaaattatcttgttcatttatttacatacttgtttatagcttatttctcagctggacatggtgcctcacacctgtaatctcaatactttgggaggctgggttggagaattggttgagcccaggacttcaagaccagcctgggcaacaaagtgagaccctgtctataaaaaattgtttaaaaattagctgggcatggtggcacatgcctgtggtcccagctacttgggaggcagaggtgggagaatcgcttgggcccaggaggttgaggcgacggtgagccatgattgtgccactgcactctagcctagtgacagagtgagaccatgtgtctaaaaagtaaataaaaatagtttctctttcatgactagaatattacctctatgtgggcagggagtttgtctatactatttggcactatatttcctgattctgaaattatgcctagcacatggtaagtactccttaaatatttattgactgaattatttaatacttaagaatttcatttgggattatctgagtggtaagattacggattatatttatgtaagaaaaaatcattttttaaacttggttgccctttgccacactgacatagacactaagttttcttagccagattacttccgaggatactcacagaggccattctcttctcaatccccaaataattgatatttcttagcactttcaagctaatgcaattcttagatgatgtatctgtgtatatcatatcctcattctacaaatgtagaaattgaagtctgggcacagtggctctcacctgtaatctcagcagtttgggaggccaaggcgagcggatcactgaggacaagagttaagaccagcctggccaacatggtaaagccttgcctctattaaaaatacaacaattagggccgggcgtggtggctcacgcctataatcccagcacgttgggaggccaaggcaggcagatcacgaggtcaggagttcgagaccatcctggctaacacagtgaaaccccatctctactaaaaatacaaaaaattagccaggcatggtggcacgcgcttgtagtcccagctatcgggaggctgaggcaggtgaatcccttgaacccgggaggcggaggttgcaatgagctgagattgcaccgctgaactccagcctggtcaacagagggagactctgtctcaaaaaaaaaaaaaaaaaacaattagccaggcgtggtggcgggtacgagtacctgtaatcccagctactagggaggctgagggaggagaatcacttaaacccaggaggtggagtttgcagcgggctgataatgcaccactacattccagcctgggcaacagagtgagactctgtcttaaaaaaaaaaaaaagaaagaaagaaattgaggaatgtggagattgtggtctgtgatttgttaggaatcacacagcaggttagtagcaactacagggctttggttcagaataccaccttgacaatggtttgtttacagttcggctccccttcctctgcctttctctccttccttattgagggcagctggaaagaattttcatcatttactagcctatagctttaatttgagttttgaaaccttgataatagagcacagaggaaaagactgagttttctttttttgagacagtcttgctctatggcccaggctggagtgcagtgacaccatctcagctggttgcaacctctgcctcccaggttcaagcaattctgcctcagcctctcgagtagctgagattacaggcacgtgtcaccacgcccagctaattttctgtttttgtttcgttttgtttttttctgagatggagtcttgctctgtcacccaggctggagtgcagtggtgcgatgttggctcactcaaacctctgtctcctgggttcaagcaattcttctgcctcagcctccccagtagctgggactacaggtacgtgccaccatccctagttcatttttgtatgtttagtagagatggggtttcactatgttgaccaggctggtctcgaactcctgatctcaggtgatctactcgtctcagtttcccaaagtgctgggattattggcacacgcctatttttgtatttttagtagagacggggtttcaccatgttggttagactggtctcaaacttctgacctcaagtgatttgcccgccccagcctcccaaagtgctgggattacaggcgtgagccaccgtgcccagccaagattgagttttgaaaagagccttctgagattatgagaagggcaagcaagataacttaagaagttacattaaaatcatctaagagacagtgtaacaagaaggaattgtaaaatgatgttatgagcacgtgcccaatgtagtggcaatcccttgtgcttcgatacattggtgggagacaaaactgtacttaaattgataaatcccttacatgtcattttaaggagcttagactgactcccatcatgtagacatcagagatttcttttttttttttttttttttttttttttttttttgtgacagagttttgctcttgttgccgaggctggagtgcaatggcgtgatctcggctcaccacaacctccacctcccaggttcaagcaattctcctgcctcagcctcccgagtagctgggattacagccatgcaccaccacgcctggctaattttgtatttttagtagagacggggtttctccatgttgtggctggtctcgaactcctgacctcaggtgatcctcccgcctcagccacccaaagttctgaaattacaggcgtgagccaccgcgcccagcccagagatttctaaacagagttctaaccagatgcttttccctgtcagtagaatgagaatgaattggaggtgggagagactggcatgagggacaccagtcagccagtggaattagctggtaatgttgataggagaagaaaaagattcaaagttaggtagtggtagcaagaattagagggaaggtcggatttatgatatgtccaaggttgaattctaaggtgaaatttggtggcagatttcatgtgtaaattgggaaggtagattgagtttttttaacatgggttttctaacatgtcaatagagtgactctgcaggggggcctgacgagagaacagtgcatggggtgattcaacagccagttgagccttcatgcagagcatttaacactgtgactctgtagactctggttggcagtaaaatttcattaaaccaatatttaaacccttaggtaataataaaaattgagggaaaaggatccaggttttgtattttttatgaattcagttattgaattaaacaggaccttgcctcaagaaataatctaccaacaattaacttgttttaaagcaaagttaggaagtgagcatgttcaaattattaaataaaaaagtaagctgtgtatttcattcatagaaatagaggctggcctacttcggatgattctcagcatgtgattacagatgtgggcttatacatcctagggagttaaggcgtactctggcttggatagagtagagctctttgaaactcttctctcacccagctagtttatatagactagagaactagaatgtagcagcatactctgtcttagaagcccttttatataggagctggtctggaaggtttgaaaacataacaaatgtgttggtgtctcccaatgtattgctagattcttacccaagagcattatcctggttagggtttggtttggttttgttttgttttttaatgtttgccacaaactaacactagatgttagttctttcatcaagtgaggagagtagaagaaaagtccagaactctgaaacaccttttcaaaagtttttcaagccatgatgtttgcaagttaaatgctctgttatgtaagcaatataatcagtttttattaatgtaacattccttagtgttttggggtatcacacaaaaaagaatatccatatctggaagcaacagcttttaaataagagcattgtggtggtggtggtgatagtggtttttttttttttttttgagttggagtctcgctctgttgcccaggttggagtgcagtggcacgatctcagctcgcttcaacctctgctcccaggttcaagcaattcttctgcctcagcctcctgagtagctgggattataggcacctgctaccatgcctggctgatttttattattttagtagagacaggtttcaccatgttggccaggctggtcttgaactcttaacctcaggtgaatcacccacctcggcctcccaaagtgctggaattacaggcatgaaccaccatggccagccaaataagagcatttttaatgtaaaattatgcatgaaatgtacattcaattttgtctttgtttactaggatccatgttctcacaagctatgaagaaatgggtgcaaggaaatactgatgaggtaaatcctacctttaggataaaaagatttctgtttataagtgccaccctcatgtaagtgaggtttaaaattttccttttctttaggtcccatgtttaagcagcatggcacatttatgttctcttacccagaatgtaccaagaaagggtggtcccttcttaacatctaacaattgcctggtagtagcagtgaaggtatcttcagtcagaggctaggaccactgaaggatatacatgcattcaagtttccatcagccagcaggcatcagtaatcagtgtgtagatcaaaagctcaaatgtttccttccccactggcagttttacttcaagtagtggaggcttgcttttttaatagttaattaagtacattgagagatgggaggtgaaaaaaggaaaatgttttattttgaccatctaatatgaaagtagttcggtgttaggtatccagtagttgacactggaagacagggaatgacatgttaatattcatagccagagggtggcccaggttttttcgtacatgggaatgaaattcttatccaaataagtagaaattatgtgcgtaagccatttgttaagagcactgagtatgtgcatctcgatccatctaatgaataaccattatcaccagtttaaattattttctttaggcccaggaagagctagcttggaagattgctaaaatgatagtcagtgacattatgcagcaggctcagtatgatcaaccgttagagaaatctacaaaggtaaggatgacttcgttttgtgtaaactaaaaagtattattttccaggtgtaaaaataaaaaagaacataaggggtttctttgcctttgaaggattaactgctgtggggattaccttcttatcataagcaactagaaaattgacaaactaaatgaaacaactgtttgcatatattggacaatgggcaatacagggaaaccatggaaaccaaacagagcccagtagtcttgctgaacgaaagagttaaatatcaaagttcaggccaggtgcagtggctcacgcctgtaatcccagcactttgggaggccaaggcgggtgaatcacttgaggtcaggagttcaagaccagcctggccaacatggtgaaaccctgtcttagccgggtgtggtggcaggcacctgtaatcccaactatttgggaggctgaggcaggagaatcgcttgaaccagggaggcggaggttgcagtgagccgagatcacaccactgcactccagcctgggcgacgagcgaaaccccatttcaaaaaaaaaatcaaagttcagagagctcaatttgagtagaagttgtaggataaggtagcagaaaagaggaagctgcccagaaagaaagccgtagagatatttagagagattcccatggatccttggcctaggagtgatctgtatatgtgtggggtgaaaacgcatgtgtccaggtagagaaccccccagaaattagtaggctgaatgattgctggaacatagggctaagaaaagttcatggccagaaggatctggccagagtagagagacttagtaatacacaaggcattgggtagtgtcttcacagaggttatgccttactactgaagataaattagtcctagagtacaagcacctgaaccaagtttcaaagcaaatttttaaagggtcaaattacctaacaactgcatgccaaaacaaaggcctaaccctctttacagtaacacaacaaaattcagcacttcacagtgtaaagttagaatgtctgacgtccaggctgggcgcagtggctcatgcctgtaatcccagcactttgggaggccgaggcaggtagatgacctgaggtcaggagttcaagaccagcctggctaacatggtgcaaccccgtctctattaaaaatacaaaaacttagccaggcatggtggccggcacctgtgatcccggctacttgggaggctgaggcaggagaattgcctgaacccaggaggtgaaggttgcagtgagccgagatcgcaccactgcactctggtctgggcaaaaagagcaaaactcaggctcaaaaaaaaaaaagaatgtctgacgtcaatcacaaattaccaagcatgacatgaagttgacctataaccaggagaaaactcaatctatagaaacagacccagatgtgagaaagatgatgaatttagcagacaaagaccatcaagtggctattttaaatattaaaaatatgttcaagtggccaggtgcagtggctcatgcctgtaatcccagcactttgggaggccaaggtgggtaggagttcaagaccagcttggccaatatggtgaaaccccttctctactaaaaatacaaaaaaattagctgggcatggtggcaggtgcctatagtcccagctatatgggaggctgaggcacaagaatcacttgaacccgggaggtggaggttgaggttgcagtaagccgagattgtgccacttgtactccagcctggacaacagagtgagactctgtctcaaaaaaaaaaaaaaaaaagttaaagaaaacaagagtataatgagaaaaatgcaaaatagttttaaaagaaccaaatggaatttcttaaaataaaaaataccagaaatgggggccgggcgtggtagctcacgtctataatcccagcactttgtgggggctgaggcaggcagatcacctgagatcggtagttcaaggccagcctgaccaacatggagaaacctcatctctactaaaaatacaaaattagctgggcgtggtggcgcattgcctgtaatcccagctacttgggaggctgaggcaggagaattgcttgaacccgggaggcagaggttgcggtgagctgagattgcaccagtgcactccagcttgggccacaagagtgaaactccgtctcaaaaaaaaaacaaaaaaaaacagtagactcgaagaactagctgagtttttctttactttaggcagtaagtgtgaccttttgcaggtgactactttagttcctcatgtcctcattagtagatcagagaaattcgacaccaaaaccccaaaagaaaaaccccttctaatcctcattccatgattttatgaatgcatgaagtcctaggcctgcgaaggaatactcattctctttatcctgtgttgatacctctctgcttcaacctccaactcgacatttgcctataggatgtacttggacattcagcataaactacctcacaccattactgaattgcttcatgtgcacatgtcccatgccacaataccggggaccttgtcttccgtgatatttgtccgcagtgctgtgactacaggagggagtcagtgaatgtctgcatgtgtgtctttaccatccctcttgaatatgctctagggttaattcctagaagtagaattactctattgaaaattggcaatatttttcattctaatatctattgccaacatgggaaagcaagtctggatgccagtccttgttatatgccccttgggtaagttacgtaacctctttaagcttctgttcactcatattttaacaaggaaaattacaatattttacctcacaaaattgtagtcagcttctggctgtcttaaactctggtatatagtaaacactaagtgttggtgtccatccttaatttgtaataataggtcacttgttagagaaatgcaccttaccattttcttttcttttcttttttcagttatgactcaaaacttgagataaaggaaatctgcttgtgaaaaataagagaacttttttcccttggttggattcttcaacacagccaatgaaaacagcactatatttctgatctgtcactgttgtttccaggagagaatgggagacaatcctagacttccaccataatgcagttacctgtaggcataattgatgcacatgatgttcacacagtgagagtcttaaagatacaaaatggtattgtttacattactagaaaattattagttttccaatggcaataacccatttatgagagtgttttagcctactggaatagacagggaccacatcctctgggaagcagataagcatagaactgatacttgatgcacactcgtagtggtaactcatccctaatcagcattgtaaagcaggtgccagaggtggtttgctttgtccttccaaagcaggtgagtcagccccaccgagagccaggcagctttgagtggcagcgtggtgctagcagcttcagcggaacagggtgagagttaattatgcagtcttcttgacagcggcattaatttggaaggaaactgacaagtcatgggtcaagtttcagtgacttcctccttcctctgatggcagtatatagttttcacattttaattcctcctcctgagatgcactatacttaaaaccattctctcccctgctaacagaagggtgtgaatctggtttactttgagcattaggatttgcccctttggaattctgcactccagttacttaactttcccttcagaatacatgtggaaagaaagaaagaaatagcgatgactccacttttgcccctgtggcaccttgaacaaagcagttcttcccaaattatactttttttttttttaaataaggtgagcaggatgactggggagagagaaacatttgactttgactgcctcccccattctttgctgtgagctggaaagtgtgcagttggtcgtctttcttctcctttctttaggatagtaagagactcactcactgcacttctgctcagttggcttctgcatcgggatcacacagccatcagcaggactgcccagttggtgagcacactccattgaccacgcggcgccagcgcttcctcaatgcacatgattgagaggaaagaaagttctcttagatgttactgcttttgctcagactttgcaaaaaaaaaaatatatatatatatgtataaatatataattattaatcacttttgtccttgagaaagtcttgaatgaacagagaatttattccattgcaatatttgattgtatagaggcacactgtttcatcgacagaagaagcaaaaaggctttgtgtaagtttttggtactatgtaccacctctgttattcttttaaagctgaagtattcatgtacttaaaccatattatatttaattgtgtttgattttaaaatatatatatatgaattctatttaaaattgtgtcaactttctgctttcagggcatttatggctcttctgttgaaatatattgatctttccaaatattttcatttgctttctaaaaacccagaacatgagccactactggactttgccttgtgtttgaagtgtatggcataaacccaaggtttttattagtcatctatgctgtgattaattcattttgttcttttaacaaaatatttccatccacttcacattgcttcaatctttaacagaaaagcaatataaaggttatagaataaaatgtggttttgggcaactcttgctgcctctgcatgttttggaataacaatttctacaagactctaggctgtttaaactagtgctttcagttaagataaattctaatcatttctttgtatatacattttgtgcttctgagctagagatgccaagtagttgtaaactgcttataaagagaatagcagcaaatttgagactcggctacttttttctgccccacctgctttgagacacagaagcggagtgtggcccgaaattattagccagatttaatatttgatctaaagtaggtccttgtactcattttaaagttggaatttgattcctccaacattgagcacccaccatgttccaggctctgtgcattgtgcccacaaaataagattccctggtggagtttttatgggttcaaataatcagttgaacacccttcatctttatcatgttgttgacattgacacaaattgtttaaaaagaaaagatattagagagaaagtggtacctttgtaacttgatgtgtcttcatcattcggtaagatttgatgaaagtaaaaagcaaatgtcagccaaatccagtgaacagcaataaaacagggagtaactttttataactttttctacttggatttcaacattcagtagagcttttcgaaatgtaagtagtttacagtactggaggtttgactagttcagtaggaatttggaggggaaggtcattctgaattgtaacaaagtacaaacttctttgctgttttatttaagtactgagagctaagcacctgatgaagtgactgacctctctccagtgacagtgtttgggtacctgcctgacttcaggagtggggtttatgtttctacacagtgaccttttctctcgccctctcctccctcttgcccacacaccagttgattggacctgggttgaactcctgatccagacaggcccaagacagttcttaatgttaagaattttggggccgggcacggtggctcatgcctgtaattgcaacactttgggaggccgagacaggcggatcacttgaggtcaggggttcgaggccagcctggccaacatggtgaaaccctgtctttactaaaaatacaaaaattagctgggcatggtggcgcacgcctgtaatcccagctacgtgggtggctgagacaggggaatcgcttgaacctggaggcggaggttgtgcaatgagccgagaccgtgtcactgcattccagcctgggtgacagagggagactctgtctccaaaaataaaaataagaaaaagaattttgggctaggtgcagtggctcacgcctgtaattacagcattttggaaggcccaagatgggcagatcacttgaggacaggagttcgagaccagcctggacaacatggtgaaactccatctctactaaaaagacaaaagttagccagatgtggtgatgggcacctataatcctagctcctcgggaggctggggcaggagaatcacttgaacccaggaagcagagattgcagtgagccaagatcacatctctgcactccagcctgggcaacagagcaagactctgtctcaaaaaaaaaagaatttggccaggcgcagtggttcacgcctgtaatcccagcactttgggaggccaaggcaggcagatcacgaggtcaggagatcgagattgtcctggctaacatggtgaaaccctgtctctactaaaaatacaaaacattagccgggtgtggtggtgggcacctgtagtcccagctactagggaggctgaggcagaggaaggatgtgaacccaggaggcggagcttgcagtaagccaagatcgtgccactgcactacagtctgggcgacagagtgagactccgtctcaaaaaaaaaaagaattttggccgggtgcggtggcacatgcctgtagtcccagcactttgggagaccaaagtgggcggattacctgaggtcaggagttcaagaccagtccggccaatatggcgaaaccctgtctcttactaaaaaaaatacaaaaattagccaggtgtggtggcgggcacctggggaggctgaggcagggagaaatgcttgaaccggggaggcagaggttgcagtaagccaagatcgtgccactgcactccagagcaagactctttctcaaaaaaaaaaaaaaaagaattttgcatggggaaggagagatactgttcaccatctggaatggtgcttggatgtggcacttacaaaatcaggagccagcactgcatggacaaacagaagcatgtgggcctgagatagcaggtaccttgataaccctgaagacatccttggtttctgcatctattcctgcatccttgcattggactacattaatctgtcagttatccttataatgatttttgattttttttttttgagatggagtttcgctcttgttgcccaggctggagtgcaatggcacgatctcggctcaccacaacctccacctcccaggttcaagtgattctgctgcctcagcctcctgagtaactgggattacaggcatgcgccaccacacctggctaattttgtatttttagtagagacggggtttctccatgttggtcaggctggtctcgaactcccaacctcaggtgatcaccctgtctcggcctcccaaagtgctgggattacaggcgtaagccatggtacccggtctgttttttgattttttgaaaccagtctgaagtgagtttttttaattacgtgaaaggagtttggctaaaatactgccatactgccctaatgcctaatgattatgtattctcagcatgtctgcaaagtactgctgatttctggagaataatttttctttagtaaacttcacttaagtcgtcatgtgtattctctcaaaatggtatcctaacctaatggagctaaaagacaccccttgtttttataacaagcagttactgaggcccaggaaggggagaagtccctggcttgtgagatgatcaccattagaactcaggcctgggccagtgccttttcatgcttctcagatccttccaaagaataatgaagattataaccgcttttagcaattgtaataaacccagaaatagaaagctttttggttagagtactggtagaagtttggcgggagagataatttttacaaaatttgtaaatacctgccaattctatatactaggcaaggtctctggccttgtaaaacccctcaaggttacaactttggtggcccacactaatagttacccactgaggccctctccgggtgaacattgagcactagaggaagcccctctgcttgggcaggactgggcgtggtgcagagtaggagcggtgatactgtggattctgggcaggtggagatggccagtgatgtccaataaaggacactggagggagcagtgtgagtaaaggccctgagggcattcatgttcagggagggttgctgcccactggcttgcttggcacacaggagagtgggtattcctgccttagtaactttatgtaaacaagtatttcctcagtctgttcctctcaaactgcctgctctggcacattcagaatgtcacagaactcacctggatgcattcagccccttgcctaaaggtgacagtgcatctccttccccaccccacccctcataccactgaagcacctgtcagactggcccagtctgtgggcaaggagcctagagagggcttagtttcagcttgaaaggagctgggatttaccaagaagcaaatgagagacgaggattgcaacaactgtgccatttccccagcttcagctgactcctgtatattgactgtgccttcagactcatccgtaagtgaccccaggctggcctctcccacatcacagtaagaattccacacaccatacaacttggaaagaggctccagctgaaggaagccccacacttctttcaagtttttcttagtcttctcttcttggcaaagagtaccttttgtttcttctaattatgtaactattggtttagtaaatattcacccattcagtcaccctgtaagtggcaggcactgtttacagggacacaggaaggaataaaaacttgcaggcaccttggagcttgcattctattgaagaggtaatggaagttgggatagcagctaaactatgctggtattggccaggcgcagtggctcacacctgtaatcccagcactttggaggccaaggtgggcagatcatgaagtcaggagatcgagaccatcctggctaacatggtgaaaccccgtctctactaaaagtaaaaaaaaaaattagccaggtgtggtggcgggcgcctgtagtcccagctacttgggaggctgaggcaggagaatggtgtgaacccaggaggcgaagattgcagtgagccgagatggcaccactgcactccagcctgggtgacagagcgagactctgtctcagaaaaaaaaaatatgctggtagttttgattcaagatggcctttggagcccatgatttaggtctcgtacccaccaaggtctactggaaaacatcaggctctcctgctatagacccatagggagagctgcagccgagagggggagctgaagagaagtgccccttctgtgtcctgtcagcctcatccttccgcaaggaccagttgctgtgccactccattcacttgctgcaagactggaggtttttcctcaggtgttgagcacctggtttacaagatgtcagcatcttgatgcctgagaccatcaaggcaagtctctgaacagggcttaccttagagtaaggcttagaagaggccgtaaagtcagtctcagctccgtggctctgcagagctttgggacatgtgaattcttaaaaacaagactattgtacagttactatatgcatgcagtataaaattataaccttggaaaatcctagctagctgttgagctaattccataaagtaatcagctcctgagttctgcagtggtaataataatcagcataatgagtaaacactgtgtgtgccaggcagcgtctcatttgatccttgtgataatcttgtaagtactgattttctcccttctttaaacaaagttttttttttttttttagagagggtctcactatgttgcccaggctagtcttgaattc

SEQ ID NO: 19 - DNA, 19 bp, Artificial Sequence
  Description of Artificial Sequence: Synthetic primer
gccgccatattatcaacaa

SEQ ID NO: 20 - DNA, 18 bp, Artificial Sequence
  Description of Artificial Sequence: Synthetic primer
ctctgcgtctcaggtatt

SEQ ID NO: 21 - DNA, 20 bp, Artificial Sequence
  Description of Artificial Sequence: Synthetic primer
ccccagggagttagttttgc

SEQ ID NO: 22 - DNA, 20 bp, Artificial Sequence
  Description of Artificial Sequence: Synthetic primer
gatccacggtcctcaaagaa

SEQ ID NO: 23 - DNA, 19 bp, Artificial Sequence
  Description of Artificial Sequence: Synthetic primer
cactgcacccagccttatg

SEQ ID NO: 24 - DNA, 20 bp, Artificial Sequence
  Description of Artificial Sequence: Synthetic primer
ctgggatgtgaaggaaagga

SEQ ID NO: 25 - RNA, 25 nt, Artificial Sequence
  Description of Artificial Sequence: Synthetic ribozyme
  modified_base (9): a, c, g, u, unknown or other
ugcacugangagccuggacgaaacu

SEQ ID NO: 26 - protein, 7 aa, Artificial Sequence
  Description of Artificial Sequence: Synthetic peptide
LRRASLG
